United States Patent Application Publication US 2026/0258383 A1 - sequence listing, part 5

SEQ ID NO: 6894 - protein, 2087 aa, synthetic construct
MPAAKRVKLDGGDKKYSIGLDIGTNSVGWAVITDEYKVPSKKFKVLGNTDRHSIKKNLIGALLFDSGETAEATRLKRTARRRYTRRKNRICYLQEIFSNEMAKVDDSFFHRLEESFLVEEDKKHERHPIFGNIVDEVAYHEKYPTIYHLRKKLVDSTDKADLRLIYLALAHMIKFRGHFLIEGDLNPDNSDVDKLFIQLVQTYNQLFEENPINASGVDAKAILSARLSKSRRLENLIAQLPGEKKNGLFGNLIALSLGLTPNFKSNFDLAEDAKLQLSKDTYDDDLDNLLAQIGDQYADLFLAAKNLSDAILLSDILRVNTEITKAPLSASMIKRYDEHHQDLTLLKALVRQQLPEKYKEIFFDQSKNGYAGYIDGGASQEEFYKFIKPILEKMDGTEELLVKLNREDLLRKQRTFDNGSIPHQIHLGELHAILRRQEDFYPFLKDNREKIEKILTFRIPYYVGPLARGNSRFAWMTRKSEETITPWNFEEVVDKGASAQSFIERMTNFDKNLPNEKVLPKHSLLYEYFTVYNELTKVKYVTEGMRKPAFLSGEQKKAIVDLLFKTNRKVTVKQLKEDYFKKIECFDSVEISGVEDRFNASLGTYHDLLKIIKDKDFLDNEENEDILEDIVLTLTLFEDREMIEERLKTYAHLFDDKVMKQLKRRRYTGWGRLSRKLINGIRDKQSGKTILDFLKSDGFANRNFMQLIHDDSLTFKEDIQKAQVSGQGDSLHEHIANLAGSPAIKKGILQTVKVVDELVKVMGRHKPENIVIEMARENQTTQKGQKNSRERMKRIEEGIKELGSQILKEHPVENTQLQNEKLYLYYLQNGRDMYVDQELDINRLSDYDVDHIVPQSFLKDDSIDNKVLTRSDKARGKSDNVPSEEVVKKMKNYWRQLLNAKLITQRKFDNLTKAERGGLSELDKAGFIKRQLVETRQITKHVAQILDSRMNTKYDENDKLIREVKVITLKSKLVSDFRKDFQFYKVREINNYHHAHDAYLNAVVGTALIKKYPKLESEFVYGDYKVYDVRKMIAKSEQEIGKATAKYFFYSNIMNFFKTEITLANGEIRKRPLIETNGETGEIVWDKGRDFATVRKVLSMPQVNIVKKTEVQTGGFSKESILPKRNSDKLIARKKDWDPKKYGGFDSPTVAYSVLVVAKVEKGKSKKLKSVKELLGITIMERSSFEKNPIDFLEAKGYKEVKKDLIIKLPKYSLFELENGRKRMLASAGELQKGNELALPSKYVNFLYLASHYEKLKGSPEDNEQKQLFVEQHKHYLDEIIEQISEFSKRVILADANLDKVLSAYNKHRDKPIREQAENIIHLFTLTNLGAPAAFKYFDTTIDRKRYTSTKEVLDATLIHQSITGLYETRIDLSQLGGDGGGGSGGGEAAAKGGIPWLMKKPLQLTTLVPLQEYEERLLKQTMLTGSYKEKLQSLFLKYDALWQHWENQVGHRRIKPHHIATGTVNPRPQKQYPINPKAKASIQTVINDLLKQGVLIQQNSIMNTPVYPVPKPDGKWRMVLDYREVNKTIPLIAAQNQHSAGILSSIFRGKYKTTLDLSNGFWAHSITPESYWLTAFTWLGQQYCWTRLPQGFLNSPALFNADVVDLLKEVPNVQVYVDDIYISHDDPREHLEQLEKVFSLLLNAGYVVSLKKSEIAQHEVEFLGFNITKEGRGLTETFKQKLLNITPPRDLKQLQSILGLLNFARNFIPNFSELVKPLYNIIATAPGKYITWTTDNSQQLQNIISMLNSAENLEERNPEVRLIMKVNTSPSAGYIRFYNEFAKRPIMYLNYVYTKAEVKFTNTEKLLTTIHKGLIKALDLGMGQEILVYSPIVSMTKIQKTPLPERKALPIRWITWMSYLEDPRIQFHYDKTLPELQQVPTVTDDIIAKIKHPSEFSMVFYTDGSAIKHPNVNKSHNAGMGIAQVQFKPEFTVINTWSIPLGDHTAQLAEVAAVEFACKKALKIDGPVLIVTDSFYVAESVNKELPYWQSNGFFNNKKKPLKHVSKWKSIADCIQLKPDIIIIHEKGHQPTASTFHTEGNNLADKLATQGSYVVNAGKRTADGSEFEKRTADGSEFESPKKKAKVE

SEQ ID NO: 6895 - protein, 2176 aa, synthetic construct
MPAAKRVKLDGGDKKYSIGLDIGTNSVGWAVITDEYKVPSKKFKVLGNTDRHSIKKNLIGALLFDSGETAEATRLKRTARRRYTRRKNRICYLQEIFSNEMAKVDDSFFHRLEESFLVEEDKKHERHPIFGNIVDEVAYHEKYPTIYHLRKKLVDSTDKADLRLIYLALAHMIKFRGHFLIEGDLNPDNSDVDKLFIQLVQTYNQLFEENPINASGVDAKAILSARLSKSRRLENLIAQLPGEKKNGLFGNLIALSLGLTPNFKSNFDLAEDAKLQLSKDTYDDDLDNLLAQIGDQYADLFLAAKNLSDAILLSDILRVNTEITKAPLSASMIKRYDEHHQDLTLLKALVRQQLPEKYKEIFFDQSKNGYAGYIDGGASQEEFYKFIKPILEKMDGTEELLVKLNREDLLRKQRTFDNGSIPHQIHLGELHAILRRQEDFYPFLKDNREKIEKILTFRIPYYVGPLARGNSRFAWMTRKSEETITPWNFEEVVDKGASAQSFIERMTNFDKNLPNEKVLPKHSLLYEYFTVYNELTKVKYVTEGMRKPAFLSGEQKKAIVDLLFKTNRKVTVKQLKEDYFKKIECFDSVEISGVEDRFNASLGTYHDLLKIIKDKDFLDNEENEDILEDIVLTLTLFEDREMIEERLKTYAHLFDDKVMKQLKRRRYTGWGRLSRKLINGIRDKQSGKTILDFLKSDGFANRNFMQLIHDDSLTFKEDIQKAQVSGQGDSLHEHIANLAGSPAIKKGILQTVKVVDELVKVMGRHKPENIVIEMARENQTTQKGQKNSRERMKRIEEGIKELGSQILKEHPVENTQLQNEKLYLYYLQNGRDMYVDQELDINRLSDYDVDHIVPQSFLKDDSIDNKVLTRSDKARGKSDNVPSEEVVKKMKNYWRQLLNAKLITQRKFDNLTKAERGGLSELDKAGFIKRQLVETRQITKHVAQILDSRMNTKYDENDKLIREVKVITLKSKLVSDFRKDFQFYKVREINNYHHAHDAYLNAVVGTALIKKYPKLESEFVYGDYKVYDVRKMIAKSEQEIGKATAKYFFYSNIMNFFKTEITLANGEIRKRPLIETNGETGEIVWDKGRDFATVRKVLSMPQVNIVKKTEVQTGGFSKESILPKRNSDKLIARKKDWDPKKYGGFDSPTVAYSVLVVAKVEKGKSKKLKSVKELLGITIMERSSFEKNPIDFLEAKGYKEVKKDLIIKLPKYSLFELENGRKRMLASAGELQKGNELALPSKYVNFLYLASHYEKLKGSPEDNEQKQLFVEQHKHYLDEIIEQISEFSKRVILADANLDKVLSAYNKHRDKPIREQAENIIHLFTLTNLGAPAAFKYFDTTIDRKRYTSTKEVLDATLIHQSITGLYETRIDLSQLGGDGGGGSGGGEAAAKGGMDPLQLLQPLEAEIKGTKLKAHWNSGATITCVPQAFLEEEVPIKNIWIKTIHGEKEQPVYYLTFKIQGRKVEAEVISSPYDYILVSPSDIPWLMKKPLQLTTLVPLQEYEERLLKQTMLTGSYKEKLQSLFLKYDALWQHWENQVGHRRIKPHHIATGTVNPRPQKQYPINPKAKASIQTVINDLLKQGVLIQQNSIMNTPVYPVPKPDGKWRMVLDYREVNKTIPLIAAQNQHSAGILSSIFRGKYKTTLDLSNGFWAHSITPESYWLTAFTWLGQQYCWTRLPQGFLNSPALFNADVVDLLKEVPNVQVYVDDIYISHDDPREHLEQLEKVFSLLLNAGYVVSLKKSEIAQHEVEFLGFNITKEGRGLTETFKQKLLNITPPRDLKQLQSILGLLNFARNFIPNFSELVKPLYNIIATAPGKYITWTTDNSQQLQNIISMLNSAENLEERNPEVRLIMKVNTSPSAGYIRFYNEFAKRPIMYLNYVYTKAEVKFTNTEKLLTTIHKGLIKALDLGMGQEILVYSPIVSMTKIQKTPLPERKALPIRWITWMSYLEDPRIQFHYDKTLPELQQVPTVTDDIIAKIKHPSEFSMVFYTDGSAIKHPNVNKSHNAGMGIAQVQFKPEFTVINTWSIPLGDHTAQLAEVAAVEFACKKALKIDGPVLIVTDSFYVAESVNKELPYWQSNGFFNNKKKPLKHVSKWKSIADCIQLKPDIIIIHEKGHQPTASTFHTEGNNLADKLATQGSYVVNAGKRTADGSEFEKRTADGSEFESPKKKAKVE

SEQ ID NO: 6896 - protein, 2094 aa, synthetic construct
MPAAKRVKLDGGDKKYSIGLDIGTNSVGWAVITDEYKVPSKKFKVLGNTDRHSIKKNLIGALLFDSGETAEATRLKRTARRRYTRRKNRICYLQEIFSNEMAKVDDSFFHRLEESFLVEEDKKHERHPIFGNIVDEVAYHEKYPTIYHLRKKLVDSTDKADLRLIYLALAHMIKFRGHFLIEGDLNPDNSDVDKLFIQLVQTYNQLFEENPINASGVDAKAILSARLSKSRRLENLIAQLPGEKKNGLFGNLIALSLGLTPNFKSNFDLAEDAKLQLSKDTYDDDLDNLLAQIGDQYADLFLAAKNLSDAILLSDILRVNTEITKAPLSASMIKRYDEHHQDLTLLKALVRQQLPEKYKEIFFDQSKNGYAGYIDGGASQEEFYKFIKPILEKMDGTEELLVKLNREDLLRKQRTFDNGSIPHQIHLGELHAILRRQEDFYPFLKDNREKIEKILTFRIPYYVGPLARGNSRFAWMTRKSEETITPWNFEEVVDKGASAQSFIERMTNFDKNLPNEKVLPKHSLLYEYFTVYNELTKVKYVTEGMRKPAFLSGEQKKAIVDLLFKTNRKVTVKQLKEDYFKKIECFDSVEISGVEDRFNASLGTYHDLLKIIKDKDFLDNEENEDILEDIVLTLTLFEDREMIEERLKTYAHLFDDKVMKQLKRRRYTGWGRLSRKLINGIRDKQSGKTILDFLKSDGFANRNFMQLIHDDSLTFKEDIQKAQVSGQGDSLHEHIANLAGSPAIKKGILQTVKVVDELVKVMGRHKPENIVIEMARENQTTQKGQKNSRERMKRIEEGIKELGSQILKEHPVENTQLQNEKLYLYYLQNGRDMYVDQELDINRLSDYDVDHIVPQSFLKDDSIDNKVLTRSDKARGKSDNVPSEEVVKKMKNYWRQLLNAKLITQRKFDNLTKAERGGLSELDKAGFIKRQLVETRQITKHVAQILDSRMNTKYDENDKLIREVKVITLKSKLVSDFRKDFQFYKVREINNYHHAHDAYLNAVVGTALIKKYPKLESEFVYGDYKVYDVRKMIAKSEQEIGKATAKYFFYSNIMNFFKTEITLANGEIRKRPLIETNGETGEIVWDKGRDFATVRKVLSMPQVNIVKKTEVQTGGFSKESILPKRNSDKLIARKKDWDPKKYGGFDSPTVAYSVLVVAKVEKGKSKKLKSVKELLGITIMERSSFEKNPIDFLEAKGYKEVKKDLIIKLPKYSLFELENGRKRMLASAGELQKGNELALPSKYVNFLYLASHYEKLKGSPEDNEQKQLFVEQHKHYLDEIIEQISEFSKRVILADANLDKVLSAYNKHRDKPIREQAENIIHLFTLTNLGAPAAFKYFDTTIDRKRYTSTKEVLDATLIHQSITGLYETRIDLSQLGGDGGGGSGGGEAAAKGGVLNLEEEYRLHEKPVPSSIDPSWLQLFPTVWAERAGMGLANQVPPVVVELRSGASPVAVRQYPMSKEAREGIRPHIQRFLDLGVLVPCQSPWNTPLLPVKKPGTNDYRPVQDLREINKRVQDIHPTVPNPYNLLSSLPPSHTWYSVLDLKDAFFCLKLHPNSQPLFAFEWRDPEKGNTGQLTWTRLPQGFKNSPTLFNEALHRDLAPFRALNPQVVLLQYVDDLLVAAPTYRDCKEGTQKLLQELSKLGYRVSAKKAQLCQKEVTYLGYLLKEGKRWLTPARKATVMKIPPPTTPRQVREFLGKAGFCRLFIPGFASLAAPLYPLTKPSIPFIWTEEHQKAFDRIKEALLSAPALALPDLTKPFTLYVDERAGVARGVLTQTLGPWRRPVAYLSKKLDPVASGWPTCLKAVAAVALLLKDADKLTLGQNVTVIASHSLESIVRQPPDRWMTNARMTHYQSLLLNERVSFAPPAVLNPATLLPVESEATPVHRCSEILAEETGTRRDLKDQPLPGVPAWYTDGSSFIAEGKRRAGAAIVDGKRTVWASSLPEGTSAQKAELVALTQALRLAEGKDINIYTDSRYAFATAHIHGAIYKQRGWLTSAGKDIKNKEEILALLEAIHLPKRVAIIHCPGHQKGNDPVATGNRRADEAAKQAALSTRVLAETTKPAGKRTADGSEFEKRTADGSEFESPKKKAKVE

SEQ ID NO: 6897 - protein, 2096 aa, synthetic construct
MPAAKRVKLDGGDKKYSIGLDIGTNSVGWAVITDEYKVPSKKFKVLGNTDRHSIKKNLIGALLFDSGETAEATRLKRTARRRYTRRKNRICYLQEIFSNEMAKVDDSFFHRLEESFLVEEDKKHERHPIFGNIVDEVAYHEKYPTIYHLRKKLVDSTDKADLRLIYLALAHMIKFRGHFLIEGDLNPDNSDVDKLFIQLVQTYNQLFEENPINASGVDAKAILSARLSKSRRLENLIAQLPGEKKNGLFGNLIALSLGLTPNFKSNFDLAEDAKLQLSKDTYDDDLDNLLAQIGDQYADLFLAAKNLSDAILLSDILRVNTEITKAPLSASMIKRYDEHHQDLTLLKALVRQQLPEKYKEIFFDQSKNGYAGYIDGGASQEEFYKFIKPILEKMDGTEELLVKLNREDLLRKQRTFDNGSIPHQIHLGELHAILRRQEDFYPFLKDNREKIEKILTFRIPYYVGPLARGNSRFAWMTRKSEETITPWNFEEVVDKGASAQSFIERMTNFDKNLPNEKVLPKHSLLYEYFTVYNELTKVKYVTEGMRKPAFLSGEQKKAIVDLLFKTNRKVTVKQLKEDYFKKIECFDSVEISGVEDRFNASLGTYHDLLKIIKDKDFLDNEENEDILEDIVLTLTLFEDREMIEERLKTYAHLFDDKVMKQLKRRRYTGWGRLSRKLINGIRDKQSGKTILDFLKSDGFANRNFMQLIHDDSLTFKEDIQKAQVSGQGDSLHEHIANLAGSPAIKKGILQTVKVVDELVKVMGRHKPENIVIEMARENQTTQKGQKNSRERMKRIEEGIKELGSQILKEHPVENTQLQNEKLYLYYLQNGRDMYVDQELDINRLSDYDVDHIVPQSFLKDDSIDNKVLTRSDKARGKSDNVPSEEVVKKMKNYWRQLLNAKLITQRKFDNLTKAERGGLSELDKAGFIKRQLVETRQITKHVAQILDSRMNTKYDENDKLIREVKVITLKSKLVSDFRKDFQFYKVREINNYHHAHDAYLNAVVGTALIKKYPKLESEFVYGDYKVYDVRKMIAKSEQEIGKATAKYFFYSNIMNFFKTEITLANGEIRKRPLIETNGETGEIVWDKGRDFATVRKVLSMPQVNIVKKTEVQTGGFSKESILPKRNSDKLIARKKDWDPKKYGGFDSPTVAYSVLVVAKVEKGKSKKLKSVKELLGITIMERSSFEKNPIDFLEAKGYKEVKKDLIIKLPKYSLFELENGRKRMLASAGELQKGNELALPSKYVNFLYLASHYEKLKGSPEDNEQKQLFVEQHKHYLDEIIEQISEFSKRVILADANLDKVLSAYNKHRDKPIREQAENIIHLFTLTNLGAPAAFKYFDTTIDRKRYTSTKEVLDATLIHQSITGLYETRIDLSQLGGDGGGGSGGGEAAAKGGTLNIEDEYRLHETSKEPDVPLGSTWLSDFPQAWAETGGMGLAVRQAPLIIPLKATSTPVSIKQYPMSQEARLGIKPHIQRLLDQGILVPCQSPWNTPLLPVKKPGTNDYRPVQDLREVNKRVEDIHPTVPNPYNLLSGLPPSHQWYTVLDLKDAFFCLRLHPTSQPLFAFEWRDPEMGISGQLTWTRLPQGFKNSPTLFNEALHRDLADFRIQHPDLILLQYVDDLLLAATSEQDCQRGTRALLQTLGNLGYRASAKKAQICQKQVKYLGYLLKEGQRWLTEARKETVMGQPTPKTPRQLREFLGTAGFCRLWIPGFAEMAAPLYPLTKPGTLFNWGPDQQKAYQEIKQALLTAPALGLPDLTKPFELFVDEKQGYAKGVLTQKLGPWRRPVAYLSKKLDPVAAGWPPCLRMVAAIAVLTKDAGKLTMGQPLVILAPHAVEALVKQPPDRWLSNARMTHYQAMLLDTDRVQFGPVVALNPATLLPLPEKEAPHDCLEILAETHGTRPDLTDQPIPDADYTWYTDGSSFLQEGQRRAGAAVTTETEVIWARALPAGTSAQRAELIALTQALKMAEGKKLNVYTDSRYAFATAHVHGEIYRRRGWLTSEGREIKNKNEILALLKALFLPKRLSIIHCPGHQKGNSAEARGNRMADQAAREAAMKAVLETSTLLAGKRTADGSEFEKRTADGSEFESPKKKAKVE

SEQ ID NO: 6898 - protein, 2098 aa, synthetic construct
MPAAKRVKLDGGDKKYSIGLDIGTNSVGWAVITDEYKVPSKKFKVLGNTDRHSIKKNLIGALLFDSGETAEATRLKRTARRRYTRRKNRICYLQEIFSNEMAKVDDSFFHRLEESFLVEEDKKHERHPIFGNIVDEVAYHEKYPTIYHLRKKLVDSTDKADLRLIYLALAHMIKFRGHFLIEGDLNPDNSDVDKLFIQLVQTYNQLFEENPINASGVDAKAILSARLSKSRRLENLIAQLPGEKKNGLFGNLIALSLGLTPNFKSNFDLAEDAKLQLSKDTYDDDLDNLLAQIGDQYADLFLAAKNLSDAILLSDILRVNTEITKAPLSASMIKRYDEHHQDLTLLKALVRQQLPEKYKEIFFDQSKNGYAGYIDGGASQEEFYKFIKPILEKMDGTEELLVKLNREDLLRKQRTFDNGSIPHQIHLGELHAILRRQEDFYPFLKDNREKIEKILTFRIPYYVGPLARGNSRFAWMTRKSEETITPWNFEEVVDKGASAQSFIERMTNFDKNLPNEKVLPKHSLLYEYFTVYNELTKVKYVTEGMRKPAFLSGEQKKAIVDLLFKTNRKVTVKQLKEDYFKKIECFDSVEISGVEDRFNASLGTYHDLLKIIKDKDFLDNEENEDILEDIVLTLTLFEDREMIEERLKTYAHLFDDKVMKQLKRRRYTGWGRLSRKLINGIRDKQSGKTILDFLKSDGFANRNFMQLIHDDSLTFKEDIQKAQVSGQGDSLHEHIANLAGSPAIKKGILQTVKVVDELVKVMGRHKPENIVIEMARENQTTQKGQKNSRERMKRIEEGIKELGSQILKEHPVENTQLQNEKLYLYYLQNGRDMYVDQELDINRLSDYDVDHIVPQSFLKDDSIDNKVLTRSDKARGKSDNVPSEEVVKKMKNYWRQLLNAKLITQRKFDNLTKAERGGLSELDKAGFIKRQLVETRQITKHVAQILDSRMNTKYDENDKLIREVKVITLKSKLVSDFRKDFQFYKVREINNYHHAHDAYLNAVVGTALIKKYPKLESEFVYGDYKVYDVRKMIAKSEQEIGKATAKYFFYSNIMNFFKTEITLANGEIRKRPLIETNGETGEIVWDKGRDFATVRKVLSMPQVNIVKKTEVQTGGFSKESILPKRNSDKLIARKKDWDPKKYGGFDSPTVAYSVLVVAKVEKGKSKKLKSVKELLGITIMERSSFEKNPIDFLEAKGYKEVKKDLIIKLPKYSLFELENGRKRMLASAGELQKGNELALPSKYVNFLYLASHYEKLKGSPEDNEQKQLFVEQHKHYLDEIIEQISEFSKRVILADANLDKVLSAYNKHRDKPIREQAENIIHLFTLTNLGAPAAFKYFDTTIDRKRYTSTKEVLDATLIHQSITGLYETRIDLSQLGGDGGGGSEAAAKGGGGGTAPLEEEYRLFLEAPIQNVTLLEQWKREIPKVWAEINPPGLASTQAPIHVQLLSTALPVRVRQYPITLEAKRSLRETIRKFRAAGILRPVHSPWNTPLLPVRKSGTSEYRMVQDLREVNKRVETIHPTVPNPYTLLSLLPPDRIWYSVLDLKDAFFCIPLAPESQLIFAFEWADAEEGESGQLTWTRLPQGFKNSPTLFNEALNRDLQGFRLDHPSVSLLQYVDDLLIAADTQAACLSATRDLLMTLAELGYRVSGKKAQLCQEEVTYLGFKIHKGSRSLSNSRTQAILQIPVPKTKRQVREFLGTIGYCRLWIPGFAELAQPLYAATRPGNDPLVWGEKEEEAFQSLKLALTQPPALALPSLDKPFQLFVEETSGAAKGVLTQALGPWKRPVAYLSKRLDPVAAGWPRCLRAIAAAALLTREASKLTFGQDIEITSSHNLESLLRSPPDKWLTNARITQYQVLLLDPPRVRFKQTAALNPATLLPETDDTLPIHHCLDTLDSLTSTRPDLTDQPLAQAEATLFTDGSSYIRDGKRYAGAAVVTLDSVIWAEPLPIGTSAQKAELIALTKALEWSKDKSVNIYTDSRYAFATLHVHGMIYRERGWLTAGGKAIKNAPEILALLTAVWLPKRVAVMHCKGHQKDDAPTSTGNRRADEVAREVAIRPLSTQATISAGKRTADGSEFEKRTADGSEFESPKKKAKVE

SEQ ID NO: 6899 - protein, 2102 aa, synthetic construct
MPAAKRVKLDGGDKKYSIGLDIGTNSVGWAVITDEYKVPSKKFKVLGNTDRHSIKKNLIGALLFDSGETAEATRLKRTARRRYTRRKNRICYLQEIFSNEMAKVDDSFFHRLEESFLVEEDKKHERHPIFGNIVDEVAYHEKYPTIYHLRKKLVDSTDKADLRLIYLALAHMIKFRGHFLIEGDLNPDNSDVDKLFIQLVQTYNQLFEENPINASGVDAKAILSARLSKSRRLENLIAQLPGEKKNGLFGNLIALSLGLTPNFKSNFDLAEDAKLQLSKDTYDDDLDNLLAQIGDQYADLFLAAKNLSDAILLSDILRVNTEITKAPLSASMIKRYDEHHQDLTLLKALVRQQLPEKYKEIFFDQSKNGYAGYIDGGASQEEFYKFIKPILEKMDGTEELLVKLNREDLLRKQRTFDNGSIPHQIHLGELHAILRRQEDFYPFLKDNREKIEKILTFRIPYYVGPLARGNSRFAWMTRKSEETITPWNFEEVVDKGASAQSFIERMTNFDKNLPNEKVLPKHSLLYEYFTVYNELTKVKYVTEGMRKPAFLSGEQKKAIVDLLFKTNRKVTVKQLKEDYFKKIECFDSVEISGVEDRFNASLGTYHDLLKIIKDKDFLDNEENEDILEDIVLTLTLFEDREMIEERLKTYAHLFDDKVMKQLKRRRYTGWGRLSRKLINGIRDKQSGKTILDFLKSDGFANRNFMQLIHDDSLTFKEDIQKAQVSGQGDSLHEHIANLAGSPAIKKGILQTVKVVDELVKVMGRHKPENIVIEMARENQTTQKGQKNSRERMKRIEEGIKELGSQILKEHPVENTQLQNEKLYLYYLQNGRDMYVDQELDINRLSDYDVDHIVPQSFLKDDSIDNKVLTRSDKARGKSDNVPSEEVVKKMKNYWRQLLNAKLITQRKFDNLTKAERGGLSELDKAGFIKRQLVETRQITKHVAQILDSRMNTKYDENDKLIREVKVITLKSKLVSDFRKDFQFYKVREINNYHHAHDAYLNAVVGTALIKKYPKLESEFVYGDYKVYDVRKMIAKSEQEIGKATAKYFFYSNIMNFFKTEITLANGEIRKRPLIETNGETGEIVWDKGRDFATVRKVLSMPQVNIVKKTEVQTGGFSKESILPKRNSDKLIARKKDWDPKKYGGFDSPTVAYSVLVVAKVEKGKSKKLKSVKELLGITIMERSSFEKNPIDFLEAKGYKEVKKDLIIKLPKYSLFELENGRKRMLASAGELQKGNELALPSKYVNFLYLASHYEKLKGSPEDNEQKQLFVEQHKHYLDEIIEQISEFSKRVILADANLDKVLSAYNKHRDKPIREQAENIIHLFTLTNLGAPAAFKYFDTTIDRKRYTSTKEVLDATLIHQSITGLYETRIDLSQLGGDGGGGSEAAAKGGGGGTVSLQDEHRLFDIPVTTSLPDVWLQDFPQAWAETGGLGRAKCQAPIIIDLKPTAVPVSIKQYPMSLEAHMGIRQHIIKFLELGVLRPCRSPWNTPLLPVKKPGTQDYRPVQDLREINKRTVDIHPTVPNPYNLLSTLKPDYSWYTVLDLKDAFFCLPLAPQSQELFAFEWKDPERGISGQLTWTRLPQGFKNSPTLFNEALHRDLTDFRTQHPEVTLLQYVDDLLLAAPTKKACTQGTRHLLQELGEKGYRASAKKAQICQTKVTYLGYILSEGKRWLTPGRIETVARIPPPRNPREVREFLGTAGFCRLWIPGFAELAAPLYALTKPSTPFTWQTEHQLAFEALKKALLSAPALGLPDTSKPFTLFLDERQGIAKGVLTQKLGPWKRPVAYLSKKLDPVAAGWPPCLRIMAATAMLVKDSAKLTLGQPLTVITPHTLEAIVRQPPDRWITNARLTHYQALLLDTDRVQFGPPVTLNPATLLPVPENQPSPHDCRQVLAETHGTREDLKDQELPDADHTWYTDGSSYLDSGTRRAGAAVVDGHNTIWAQSLPPGTSAQKAELIALTKALELSKGKKANIYTDSRYAFATAHTHGSIYERRGWLTSEGKEIKNKAEIIALLKALFLPQEVAIIHCPGHQKGQDPVAVGNRQADRVARQAAMAEVLTLATEPDNTSHITAGKRTADGSEFEKRTADGSEFESPKKKAKVE

SEQ ID NO: 6900 - protein, 2087 aa, synthetic construct
MPAAKRVKLDGGDKKYSIGLDIGTNSVGWAVITDEYKVPSKKFKVLGNTDRHSIKKNLIGALLFDSGETAEATRLKRTARRRYTRRKNRICYLQEIFSNEMAKVDDSFFHRLEESFLVEEDKKHERHPIFGNIVDEVAYHEKYPTIYHLRKKLVDSTDKADLRLIYLALAHMIKFRGHFLIEGDLNPDNSDVDKLFIQLVQTYNQLFEENPINASGVDAKAILSARLSKSRRLENLIAQLPGEKKNGLFGNLIALSLGLTPNFKSNFDLAEDAKLQLSKDTYDDDLDNLLAQIGDQYADLFLAAKNLSDAILLSDILRVNTEITKAPLSASMIKRYDEHHQDLTLLKALVRQQLPEKYKEIFFDQSKNGYAGYIDGGASQEEFYKFIKPILEKMDGTEELLVKLNREDLLRKQRTFDNGSIPHQIHLGELHAILRRQEDFYPFLKDNREKIEKILTFRIPYYVGPLARGNSRFAWMTRKSEETITPWNFEEVVDKGASAQSFIERMTNFDKNLPNEKVLPKHSLLYEYFTVYNELTKVKYVTEGMRKPAFLSGEQKKAIVDLLFKTNRKVTVKQLKEDYFKKIECFDSVEISGVEDRFNASLGTYHDLLKIIKDKDFLDNEENEDILEDIVLTLTLFEDREMIEERLKTYAHLFDDKVMKQLKRRRYTGWGRLSRKLINGIRDKQSGKTILDFLKSDGFANRNFMQLIHDDSLTFKEDIQKAQVSGQGDSLHEHIANLAGSPAIKKGILQTVKVVDELVKVMGRHKPENIVIEMARENQTTQKGQKNSRERMKRIEEGIKELGSQILKEHPVENTQLQNEKLYLYYLQNGRDMYVDQELDINRLSDYDVDHIVPQSFLKDDSIDNKVLTRSDKARGKSDNVPSEEVVKKMKNYWRQLLNAKLITQRKFDNLTKAERGGLSELDKAGFIKRQLVETRQITKHVAQILDSRMNTKYDENDKLIREVKVITLKSKLVSDFRKDFQFYKVREINNYHHAHDAYLNAVVGTALIKKYPKLESEFVYGDYKVYDVRKMIAKSEQEIGKATAKYFFYSNIMNFFKTEITLANGEIRKRPLIETNGETGEIVWDKGRDFATVRKVLSMPQVNIVKKTEVQTGGFSKESILPKRNSDKLIARKKDWDPKKYGGFDSPTVAYSVLVVAKVEKGKSKKLKSVKELLGITIMERSSFEKNPIDFLEAKGYKEVKKDLIIKLPKYSLFELENGRKRMLASAGELQKGNELALPSKYVNFLYLASHYEKLKGSPEDNEQKQLFVEQHKHYLDEIIEQISEFSKRVILADANLDKVLSAYNKHRDKPIREQAENIIHLFTLTNLGAPAAFKYFDTTIDRKRYTSTKEVLDATLIHQSITGLYETRIDLSQLGGDGGGGSEAAAKGGGGGVPWILKKPLELTIKLDLEEQQGTLLNNSILSKKGKEELKQLFEKYSALWQSWENQVGHRRIRPHKIATGTVKPTPQKQYHINPKAKPDIQIVINDLLKQGVLIQKESTMNTPVYPVPKPNGRWRMVLDYRAVNKVTPLIAVQNQHSYGILGSLFKGRYKTTIDLSNGFWAHPIVPEDYWITAFTWQGKQYCWTVLPQGFLNSPGLFTGDVVDLLQGIPNVEVYVDDVYISHDSEKEHLEYLDILFNRLKEAGYIISLKKSNIANSIVDFLGFQITNEGRGLTDTFKEKLENITAPTTLKQLQSILGLLNFARNFIPDFTELIAPLYALIPKSTKNYVPWQIEHSTTLETLITKLNGAEYLQGRKGDKTLIMKVNASYTTGYIRYYNEGEKKPISYVSIVFSKTELKFTELEKLLTTVHKGLLKALDLSMGQNIHVYSPIVSMQNIQKTPQTAKKALASRWLSWLSYLEDPRIRFFYDPQMPALKDLPAVDTGKDNKKHPSNFQHIFYTDGSAITSPTKEGHLNAGMGIVYFINKDGNLQKQQEWSISLGNHTAQFAEIAAFEFALKKCLPLGGNILVVTDSNYVAKAYNEELDVWASNGFVNNRKKPLKHISKWKSVADLKRLRPDVVVTHEPGHQKLDSSPHAYGNNLADQLATQASFKVHAGKRTADGSEFEKRTADGSEFESPKKKAKVE

SEQ ID NO: 6901 - protein, 2096 aa, synthetic construct
MPAAKRVKLDGGDKKYSIGLDIGTNSVGWAVITDEYKVPSKKFKVLGNTDRHSIKKNLIGALLFDSGETAEATRLKRTARRRYTRRKNRICYLQEIFSNEMAKVDDSFFHRLEESFLVEEDKKHERHPIFGNIVDEVAYHEKYPTIYHLRKKLVDSTDKADLRLIYLALAHMIKFRGHFLIEGDLNPDNSDVDKLFIQLVQTYNQLFEENPINASGVDAKAILSARLSKSRRLENLIAQLPGEKKNGLFGNLIALSLGLTPNFKSNFDLAEDAKLQLSKDTYDDDLDNLLAQIGDQYADLFLAAKNLSDAILLSDILRVNTEITKAPLSASMIKRYDEHHQDLTLLKALVRQQLPEKYKEIFFDQSKNGYAGYIDGGASQEEFYKFIKPILEKMDGTEELLVKLNREDLLRKQRTFDNGSIPHQIHLGELHAILRRQEDFYPFLKDNREKIEKILTFRIPYYVGPLARGNSRFAWMTRKSEETITPWNFEEVVDKGASAQSFIERMTNFDKNLPNEKVLPKHSLLYEYFTVYNELTKVKYVTEGMRKPAFLSGEQKKAIVDLLFKTNRKVTVKQLKEDYFKKIECFDSVEISGVEDRFNASLGTYHDLLKIIKDKDFLDNEENEDILEDIVLTLTLFEDREMIEERLKTYAHLFDDKVMKQLKRRRYTGWGRLSRKLINGIRDKQSGKTILDFLKSDGFANRNFMQLIHDDSLTFKEDIQKAQVSGQGDSLHEHIANLAGSPAIKKGILQTVKVVDELVKVMGRHKPENIVIEMARENQTTQKGQKNSRERMKRIEEGIKELGSQILKEHPVENTQLQNEKLYLYYLQNGRDMYVDQELDINRLSDYDVDHIVPQSFLKDDSIDNKVLTRSDKARGKSDNVPSEEVVKKMKNYWRQLLNAKLITQRKFDNLTKAERGGLSELDKAGFIKRQLVETRQITKHVAQILDSRMNTKYDENDKLIREVKVITLKSKLVSDFRKDFQFYKVREINNYHHAHDAYLNAVVGTALIKKYPKLESEFVYGDYKVYDVRKMIAKSEQEIGKATAKYFFYSNIMNFFKTEITLANGEIRKRPLIETNGETGEIVWDKGRDFATVRKVLSMPQVNIVKKTEVQTGGFSKESILPKRNSDKLIARKKDWDPKKYGGFDSPTVAYSVLVVAKVEKGKSKKLKSVKELLGITIMERSSFEKNPIDFLEAKGYKEVKKDLIIKLPKYSLFELENGRKRMLASAGELQKGNELALPSKYVNFLYLASHYEKLKGSPEDNEQKQLFVEQHKHYLDEIIEQISEFSKRVILADANLDKVLSAYNKHRDKPIREQAENIIHLFTLTNLGAPAAFKYFDTTIDRKRYTSTKEVLDATLIHQSITGLYETRIDLSQLGGDGGGGSEAAAKGGGGGTLNLEDEYRLYETSAEPEVSPGSTWLSDFPQAWAETGGMGLAVRQAPLIIPLKATSTPVSIKQYPMSQEAKLGIKPHIQRLLDQGILVPCQSPWNTPLLPVKKPGTNDYRPVQDLREVNKRVEDIHPTVPNPYNLLSGLPPSHRWYTVLDLKDAFFCLRLHPTSQPLFAFEWRDPGMGISGQLTWTRLPQGFKNSPTLFNEALHRDLADFRIQHPDLILLQYVDDILLAATSELDCQQGTRALLLTLGNLGYRASAKKAQLCQKQVKYLGYLLKEGQRWLTEARKETVMGQPTPKTPRQLREFLGTAGFCRLWIPGFAEMAAPLYPLTKPGTLFNWGPDQQKAYQEIKQALLTAPALGLPDLTKPFELFVDEKQGYAKGVLTQKLGPWRRPVAYLSKKLDPVAAGWPPCLRMVAAIAVLRKDAGKLTMGQPLVILAPHAVEALVKQPPDRWLSNARMTHYQAMLLDTDRVQFGPVVALNPATLLPLPEEGAPHDCLEILAETHGTRPDLTDQPIPDADHTWYTDGSSFLQEGQRKAGAAVTTETEVIWARALPAGTSAQRAELIALTQALKMAEGKRLNVYTDSRYAFATAHIHGEIYRRRGWLTSEGREIKNKSEILALLKALFLPKRLSIIHCLGHQKGDSAEARGNRLADQAAREAAIKTPPDTSTLLAGKRTADGSEFEKRTADGSEFESPKKKAKVE

SEQ ID NO: 6902 - protein, 2096 aa, synthetic construct
MPAAKRVKLDGGDKKYSIGLDIGTNSVGWAVITDEYKVPSKKFKVLGNTDRHSIKKNLIGALLFDSGETAEATRLKRTARRRYTRRKNRICYLQEIFSNEMAKVDDSFFHRLEESFLVEEDKKHERHPIFGNIVDEVAYHEKYPTIYHLRKKLVDSTDKADLRLIYLALAHMIKFRGHFLIEGDLNPDNSDVDKLFIQLVQTYNQLFEENPINASGVDAKAILSARLSKSRRLENLIAQLPGEKKNGLFGNLIALSLGLTPNFKSNFDLAEDAKLQLSKDTYDDDLDNLLAQIGDQYADLFLAAKNLSDAILLSDILRVNTEITKAPLSASMIKRYDEHHQDLTLLKALVRQQLPEKYKEIFFDQSKNGYAGYIDGGASQEEFYKFIKPILEKMDGTEELLVKLNREDLLRKQRTFDNGSIPHQIHLGELHAILRRQEDFYPFLKDNREKIEKILTFRIPYYVGPLARGNSRFAWMTRKSEETITPWNFEEVVDKGASAQSFIERMTNFDKNLPNEKVLPKHSLLYEYFTVYNELTKVKYVTEGMRKPAFLSGEQKKAIVDLLFKTNRKVTVKQLKEDYFKKIECFDSVEISGVEDRFNASLGTYHDLLKIIKDKDFLDNEENEDILEDIVLTLTLFEDREMIEERLKTYAHLFDDKVMKQLKRRRYTGWGRLSRKLINGIRDKQSGKTILDFLKSDGFANRNFMQLIHDDSLTFKEDIQKAQVSGQGDSLHEHIANLAGSPAIKKGILQTVKVVDELVKVMGRHKPENIVIEMARENQTTQKGQKNSRERMKRIEEGIKELGSQILKEHPVENTQLQNEKLYLYYLQNGRDMYVDQELDINRLSDYDVDHIVPQSFLKDDSIDNKVLTRSDKARGKSDNVPSEEVVKKMKNYWRQLLNAKLITQRKFDNLTKAERGGLSELDKAGFIKRQLVETRQITKHVAQILDSRMNTKYDENDKLIREVKVITLKSKLVSDFRKDFQFYKVREINNYHHAHDAYLNAVVGTALIKKYPKLESEFVYGDYKVYDVRKMIAKSEQEIGKATAKYFFYSNIMNFFKTEITLANGEIRKRPLIETNGETGEIVWDKGRDFATVRKVLSMPQVNIVKKTEVQTGGFSKESILPKRNSDKLIARKKDWDPKKYGGFDSPTVAYSVLVVAKVEKGKSKKLKSVKELLGITIMERSSFEKNPIDFLEAKGYKEVKKDLIIKLPKYSLFELENGRKRMLASAGELQKGNELALPSKYVNFLYLASHYEKLKGSPEDNEQKQLFVEQHKHYLDEIIEQISEFSKRVILADANLDKVLSAYNKHRDKPIREQAENIIHLFTLTNLGAPAAFKYFDTTIDRKRYTSTKEVLDATLIHQSITGLYETRIDLSQLGGDGGGGSEAAAKGGGGGTLNIEDEYRLHETSKGPDVPLGSTWLSDFPQAWAETGGMGLAVRQAPLIIPLKATSTPVSIKQYPMSQEARLGIKPHIQRLLDQGILVPCQSPWNTPLLPVKKPGTNDYRPVQDLREVNKRVEDIHPTVPNPYNLLSGLPPSHQWYTVLDLKDAFFCLRLHPTSQSLFAFEWRDPEMGISGQLTWTRLPQGFKNSPTLFNEALHRDLADFRIQHPDLILLQYVDDLLLAATSELDCQQGTRALLQTLGDLGYRASAKKAQICQKQVKYLGYLLKEGQRWLTEARKETVMGQPTPKTPRQLREFLGTAGFCRLWIPGFAEMAAPLYPLTKPGTLFEWGPDQQKAYQEIKQALLTAPALGLPDLTKPFELFVDEKQGYAKGVLTQKLGPWRRPVAYLSKKLDPVAAGWPPCLRMVAAIAVLTKDAGKLTMGQPLVILAPHAVEALVKQPPDRWLSNARMTHYQALLLDTDRVQFGPIVALNPATLLPLPEEGLQHDCLDILAEAHGTRPDLTDQPLPDADHTWYTDGSSFLQEGQRKAGAAVTTETEVVWAKALPAGTSAQRAELIALTQALKMAEGKKLNVYTDSRYAFATAHIHGEIYRRRGWLTSEGKEIKNKDEILALLKALFLPKRLSIIHCPGHQKGNRAEARGNRMADQAAREVATRETPETSTLLAGKRTADGSEFEKRTADGSEFESPKKKAKVE

SEQ ID NO: 6903 - protein, 2096 aa, synthetic construct
MPAAKRVKLDGGDKKYSIGLDIGTNSVGWAVITDEYKVPSKKFKVLGNTDRHSIKKNLIGALLFDSGETAEATRLKRTARRRYTRRKNRICYLQEIFSNEMAKVDDSFFHRLEESFLVEEDKKHERHPIFGNIVDEVAYHEKYPTIYHLRKKLVDSTDKADLRLIYLALAHMIKFRGHFLIEGDLNPDNSDVDKLFIQLVQTYNQLFEENPINASGVDAKAILSARLSKSRRLENLIAQLPGEKKNGLFGNLIALSLGLTPNFKSNFDLAEDAKLQLSKDTYDDDLDNLLAQIGDQYADLFLAAKNLSDAILLSDILRVNTEITKAPLSASMIKRYDEHHQDLTLLKALVRQQLPEKYKEIFFDQSKNGYAGYIDGGASQEEFYKFIKPILEKMDGTEELLVKLNREDLLRKQRTFDNGSIPHQIHLGELHAILRRQEDFYPFLKDNREKIEKILTFRIPYYVGPLARGNSRFAWMTRKSEETITPWNFEEVVDKGASAQSFIERMTNFDKNLPNEKVLPKHSLLYEYFTVYNELTKVKYVTEGMRKPAFLSGEQKKAIVDLLFKTNRKVTVKQLKEDYFKKIECFDSVEISGVEDRFNASLGTYHDLLKIIKDKDFLDNEENEDILEDIVLTLTLFEDREMIEERLKTYAHLFDDKVMKQLKRRRYTGWGRLSRKLINGIRDKQSGKTILDFLKSDGFANRNFMQLIHDDSLTFKEDIQKAQVSGQGDSLHEHIANLAGSPAIKKGILQTVKVVDELVKVMGRHKPENIVIEMARENQTTQKGQKNSRERMKRIEEGIKELGSQILKEHPVENTQLQNEKLYLYYLQNGRDMYVDQELDINRLSDYDVDHIVPQSFLKDDSIDNKVLTRSDKARGKSDNVPSEEVVKKMKNYWRQLLNAKLITQRKFDNLTKAERGGLSELDKAGFIKRQLVETRQITKHVAQILDSRMNTKYDENDKLIREVKVITLKSKLVSDFRKDFQFYKVREINNYHHAHDAYLNAVVGTALIKKYPKLESEFVYGDYKVYDVRKMIAKSEQEIGKATAKYFFYSNIMNFFKTEITLANGEIRKRPLIETNGETGEIVWDKGRDFATVRKVLSMPQVNIVKKTEVQTGGFSKESILPKRNSDKLIARKKDWDPKKYGGFDSPTVAYSVLVVAKVEKGKSKKLKSVKELLGITIMERSSFEKNPIDFLEAKGYKEVKKDLIIKLPKYSLFELENGRKRMLASAGELQKGNELALPSKYVNFLYLASHYEKLKGSPEDNEQKQLFVEQHKHYLDEIIEQISEFSKRVILADANLDKVLSAYNKHRDKPIREQAENIIHLFTLTNLGAPAAFKYFDTTIDRKRYTSTKEVLDATLIHQSITGLYETRIDLSQLGGDGGGGSEAAAKGGGGGTLNIEDEYRLHEISTEPDVSPGSTWLSDFPQAWAETGGMGLAVRQAPLIIPLKATSTPVSIKQYPMSQEAKLGIKPHIQRLLDQGILVPCQSPWNTPLLPVKKPGTNDYRPVQGLREVNKRVEDIHPTVPNPYNLLSGLPTSHRWYTVLDLKDAFFCLRLHPTSQPLFASEWRDPGMGISGQLTWTRLPQGFKNSPTLFNEALHRGLADFRIQHPDLILLQYVDDLLLAATSELDCQQGTRALLKTLGNLGYRASAKKAQICQKQVKYLGYLLREGQRWLTEARKETVMGQPTPKTPRQLREFLGTAGFCRLWIPRFAEMAAPLYPLTKPGTLFNWGPDQQKAYHEIKQALLTAPALGLPDLTKPFELFVDEKQGYAKGVLTQKLGPWRRPVAYLSKKLDPVAAGWPPCLRMVAAIAVLTKDAGKLTMGQPLVILAPHAVEALVKQPPDRWLSNARMTHYQAMLLDTDRVQFGPVVALNPATLLPLPEEGAPHDCLEILAETHGTEPDLTDQPIPDADHTWYTDGSSFLQEGQRKAGAAVTTETEVIWARALPAGTSAQRAELIALTQALKMAEGKRLNVYTDSRYAFATAHIHGEIYKRRGWLTSEGREIKNKSEILALLKALFLPKRLSIIHCLGHQKGDSAEARGNRLADQAAREAAIKTPPDTSTLLAGKRTADGSEFEKRTADGSEFESPKKKAKVE

SEQ ID NO: 6904 - protein, 2090 aa, synthetic construct
MPAAKRVKLDGGDKKYSIGLDIGTNSVGWAVITDEYKVPSKKFKVLGNTDRHSIKKNLIGALLFDSGETAEATRLKRTARRRYTRRKNRICYLQEIFSNEMAKVDDSFFHRLEESFLVEEDKKHERHPIFGNIVDEVAYHEKYPTIYHLRKKLVDSTDKADLRLIYLALAHMIKFRGHFLIEGDLNPDNSDVDKLFIQLVQTYNQLFEENPINASGVDAKAILSARLSKSRRLENLIAQLPGEKKNGLFGNLIALSLGLTPNFKSNFDLAEDAKLQLSKDTYDDDLDNLLAQIGDQYADLFLAAKNLSDAILLSDILRVNTEITKAPLSASMIKRYDEHHQDLTLLKALVRQQLPEKYKEIFFDQSKNGYAGYIDGGASQEEFYKFIKPILEKMDGTEELLVKLNREDLLRKQRTFDNGSIPHQIHLGELHAILRRQEDFYPFLKDNREKIEKILTFRIPYYVGPLARGNSRFAWMTRKSEETITPWNFEEVVDKGASAQSFIERMTNFDKNLPNEKVLPKHSLLYEYFTVYNELTKVKYVTEGMRKPAFLSGEQKKAIVDLLFKTNRKVTVKQLKEDYFKKIECFDSVEISGVEDRFNASLGTYHDLLKIIKDKDFLDNEENEDILEDIVLTLTLFEDREMIEERLKTYAHLFDDKVMKQLKRRRYTGWGRLSRKLINGIRDKQSGKTILDFLKSDGFANRNFMQLIHDDSLTFKEDIQKAQVSGQGDSLHEHIANLAGSPAIKKGILQTVKVVDELVKVMGRHKPENIVIEMARENQTTQKGQKNSRERMKRIEEGIKELGSQILKEHPVENTQLQNEKLYLYYLQNGRDMYVDQELDINRLSDYDVDHIVPQSFLKDDSIDNKVLTRSDKARGKSDNVPSEEVVKKMKNYWRQLLNAKLITQRKFDNLTKAERGGLSELDKAGFIKRQLVETRQITKHVAQILDSRMNTKYDENDKLIREVKVITLKSKLVSDFRKDFQFYKVREINNYHHAHDAYLNAVVGTALIKKYPKLESEFVYGDYKVYDVRKMIAKSEQEIGKATAKYFFYSNIMNFFKTEITLANGEIRKRPLIETNGETGEIVWDKGRDFATVRKVLSMPQVNIVKKTEVQTGGFSKESILPKRNSDKLIARKKDWDPKKYGGFDSPTVAYSVLVVAKVEKGKSKKLKSVKELLGITIMERSSFEKNPIDFLEAKGYKEVKKDLIIKLPKYSLFELENGRKRMLASAGELQKGNELALPSKYVNFLYLASHYEKLKGSPEDNEQKQLFVEQHKHYLDEIIEQISEFSKRVILADANLDKVLSAYNKHRDKPIREQAENIIHLFTLTNLGAPAAFKYFDTTIDRKRYTSTKEVLDATLIHQSITGLYETRIDLSQLGGDGGGGSEAAAKGGGGGTLQLDDEYRLYSPLVKPDQNIQFWLEQFPQAWAETAGMGLAKQVPPQVIQLKASATPVSVRQYPLSKEAQEGIRPHVQRLIQQGILVPVQSPWNTPLLPVRKPGTNDYRPVQDLREVNKRVQDIHPTVPNPYNLLCALPPQRSWYTVLDLKDAFFCLRLHPTSQPLFAFEWRDPGTGRTGQLTWTRLPQGFKNSPTIFDEALHRDLANFRIQHPQVTLLQYVDDLLLAGATKQDCLEGTKALLLELSDLGYRASAKKAQICRREVTYLGYSLRDGQRWLTEARKKTVVQIPAPTTAKQVREFLGTAGFCRLWIPGFATLAAPLYPLTKEKGEFSWAPEHQKAFDAIKKALLSAPALALPDVTKPFTLYVDERKGVARGVLTQTLGPWRRPVAYLSKKLDPVASGWPVCLKAIAAVAILVKDADKLTLGQNITVIAPHALENIVRQPPDRWMTNARMTHYQSLLLTERVTFAPPAALNPATLLPEETDEPVTHDCHQLLIEETGVRKDLTDIPLTGEVLTWFTDGSSYVVEGKRMAGAAVVDGTRTIWASSLPEGTSAQKAELMALTQALRLAEGKSINIYTDSRYAFATAHVHGAIYKQRGLLTSAGREIKNKEEILSLLEALHLPKRLAIIHCPGHQKAKDPISRGNQMADRVAKQAAQGVNLLAGKRTADGSEFEKRTADGSEFESPKKKAKVE

SEQ ID NO: 6905 - protein, 2096 aa, synthetic construct
MPAAKRVKLDGGDKKYSIGLDIGTNSVGWAVITDEYKVPSKKFKVLGNTDRHSIKKNLIGALLFDSGETAEATRLKRTARRRYTRRKNRICYLQEIFSNEMAKVDDSFFHRLEESFLVEEDKKHERHPIFGNIVDEVAYHEKYPTIYHLRKKLVDSTDKADLRLIYLALAHMIKFRGHFLIEGDLNPDNSDVDKLFIQLVQTYNQLFEENPINASGVDAKAILSARLSKSRRLENLIAQLPGEKKNGLFGNLIALSLGLTPNFKSNFDLAEDAKLQLSKDTYDDDLDNLLAQIGDQYADLFLAAKNLSDAILLSDILRVNTEITKAPLSASMIKRYDEHHQDLTLLKALVRQQLPEKYKEIFFDQSKNGYAGYIDGGASQEEFYKFIKPILEKMDGTEELLVKLNREDLLRKQRTFDNGSIPHQIHLGELHAILRRQEDFYPFLKDNREKIEKILTFRIPYYVGPLARGNSRFAWMTRKSEETITPWNFEEVVDKGASAQSFIERMTNFDKNLPNEKVLPKHSLLYEYFTVYNELTKVKYVTEGMRKPAFLSGEQKKAIVDLLFKTNRKVTVKQLKEDYFKKIECFDSVEISGVEDRFNASLGTYHDLLKIIKDKDFLDNEENEDILEDIVLTLTLFEDREMIEERLKTYAHLFDDKVMKQLKRRRYTGWGRLSRKLINGIRDKQSGKTILDFLKSDGFANRNFMQLIHDDSLTFKEDIQKAQVSGQGDSLHEHIANLAGSPAIKKGILQTVKVVDELVKVMGRHKPENIVIEMARENQTTQKGQKNSRERMKRIEEGIKELGSQILKEHPVENTQLQNEKLYLYYLQNGRDMYVDQELDINRLSDYDVDHIVPQSFLKDDSIDNKVLTRSDKARGKSDNVPSEEVVKKMKNYWRQLLNAKLITQRKFDNLTKAERGGLSELDKAGFIKRQLVETRQITKHVAQILDSRMNTKYDENDKLIREVKVITLKSKLVSDFRKDFQFYKVREINNYHHAHDAYLNAVVGTALIKKYPKLESEFVYGDYKVYDVRKMIAKSEQEIGKATAKYFFYSNIMNFFKTEITLANGEIRKRPLIETNGETGEIVWDKGRDFATVRKVLSMPQVNIVKKTEVQTGGFSKESILPKRNSDKLIARKKDWDPKKYGGFDSPTVAYSVLVVAKVEKGKSKKLKSVKELLGITIMERSSFEKNPIDFLEAKGYKEVKKDLIIKLPKYSLFELENGRKRMLASAGELQKGNELALPSKYVNFLYLASHYEKLKGSPEDNEQKQLFVEQHKHYLDEIIEQISEFSKRVILADANLDKVLSAYNKHRDKPIREQAENIIHLFTLTNLGAPAAFKYFDTTIDRKRYTSTKEVLDATLIHQSITGLYETRIDLSQLGGDGGGGSEAAAKGGGGGTLNIEDEYRLHETSKEPDVPLGSTWLSDFPQAWAETGGMGLAVRQAPLIIPLKATSTPVSIKQYPMSQEARLGIKPHIQRLLDQGILVPCQSPWNTPLLPVKKPGTNDYRPVQDLREVNKRVEDIHPTVPNPYNLLSGLPPSHQWYTVLDLKDAFFCLRLHPTSQPLFAFEWRDPEMGISGQLTWTRLPQGFKNSPTLFDEALHRDLADFRIQHPDLILLQYVDDLLLAATSEQDCQRGTRALLQTLGNLGYRASAKKAQICQKQVKYLGYLLKEGQRWLTEARKETVMGQPTPKTPRQLREFLGTAGFCRLWIPGFAEMAAPLYPLTKTGTLFNWGPDQQKAYQEIKQALLTAPALGLPDLTKPFELFVDEKQGYAKGVLTQKLGPWRRPVAYLSKKLDPVAAGWPPCLRMVAAIAVLTKDAGKLTMGQPLVILAPHAVEALVKQPPDRWLSNARMTHYQAMLLDTDRVQFGPVVALNPATLLPLPEKEAPHDCLEILAETHGTRPDLTDQPIPDADYTWYTDGSSFLQEGQRRAGAAVTTETEVIWARALPAGTSAQRAELIALTQALKMAEGKKLNVYTDSRYAFATAHVHGEIYRRRGLLTSEGREIKNKNEILALLKALFLPKRLSIIHCPGHQKGNSAEARGNRMADQAAREAAMKAVLETSTLLAGKRTADGSEFEKRTADGSEFESPKKKAKVE

SEQ ID NO: 6906 - protein, 2096 aa, synthetic construct
MPAAKRVKLDGGDKKYSIGLDIGTNSVGWAVITDEYKVPSKKFKVLGNTDRHSIKKNLIGALLFDSGETAEATRLKRTARRRYTRRKNRICYLQEIFSNEMAKVDDSFFHRLEESFLVEEDKKHERHPIFGNIVDEVAYHEKYPTIYHLRKKLVDSTDKADLRLIYLALAHMIKFRGHFLIEGDLNPDNSDVDKLFIQLVQTYNQLFEENPINASGVDAKAILSARLSKSRRLENLIAQLPGEKKNGLFGNLIALSLGLTPNFKSNFDLAEDAKLQLSKDTYDDDLDNLLAQIGDQYADLFLAAKNLSDAILLSDILRVNTEITKAPLSASMIKRYDEHHQDLTLLKALVRQQLPEKYKEIFFDQSKNGYAGYIDGGASQEEFYKFIKPILEKMDGTEELLVKLNREDLLRKQRTFDNGSIPHQIHLGELHAILRRQEDFYPFLKDNREKIEKILTFRIPYYVGPLARGNSRFAWMTRKSEETITPWNFEEVVDKGASAQSFIERMTNFDKNLPNEKVLPKHSLLYEYFTVYNELTKVKYVTEGMRKPAFLSGEQKKAIVDLLFKTNRKVTVKQLKEDYFKKIECFDSVEISGVEDRFNASLGTYHDLLKIIKDKDFLDNEENEDILEDIVLTLTLFEDREMIEERLKTYAHLFDDKVMKQLKRRRYTGWGRLSRKLINGIRDKQSGKTILDFLKSDGFANRNFMQLIHDDSLTFKEDIQKAQVSGQGDSLHEHIANLAGSPAIKKGILQTVKVVDELVKVMGRHKPENIVIEMARENQTTQKGQKNSRERMKRIEEGIKELGSQILKEHPVENTQLQNEKLYLYYLQNGRDMYVDQELDINRLSDYDVDHIVPQSFLKDDSIDNKVLTRSDKARGKSDNVPSEEVVKKMKNYWRQLLNAKLITQRKFDNLTKAERGGLSELDKAGFIKRQLVETRQITKHVAQILDSRMNTKYDENDKLIREVKVITLKSKLVSDFRKDFQFYKVREINNYHHAHDAYLNAVVGTALIKKYPKLESEFVYGDYKVYDVRKMIAKSEQEIGKATAKYFFYSNIMNFFKTEITLANGEIRKRPLIETNGETGEIVWDKGRDFATVRKVLSMPQVNIVKKTEVQTGGFSKESILPKRNSDKLIARKKDWDPKKYGGFDSPTVAYSVLVVAKVEKGKSKKLKSVKELLGITIMERSSFEKNPIDFLEAKGYKEVKKDLIIKLPKYSLFELENGRKRMLASAGELQKGNELALPSKYVNFLYLASHYEKLKGSPEDNEQKQLFVEQHKHYLDEIIEQISEFSKRVILADANLDKVLSAYNKHRDKPIREQAENIIHLFTLTNLGAPAAFKYFDTTIDRKRYTSTKEVLDATLIHQSITGLYETRIDLSQLGGDGGGGSEAAAKGGGGGTLNIEDEYRLHETSKEPDVPLGSTWLSDFPQAWAETGGMGLAVRQAPLIIPLKATSTPVSIKQYPMSQEARLGIKPHIQRLLDQGILVPCQSPWNTPLLPVKKPGTNDYRPVQDLREVNKRVEDIHPTVPNPYNLLSGLPPSHQWYTVLDLKDAFFCLRLHPTSQPLFAFEWRDPEMGISGQLTWTRLPQGFKNSPTLFNEALHRDLADFRIQHPDLILLQYVDDLLLAATSEQDCQRGTRALLQTLGNLGYRASAKKAQICQKQVKYLGYLLKEGQRWLTEARKETVMGQPTPKTPRQLREFLGTAGFCRLWIPGFAEMAAPLYPLTKPGTLFNWGPDQQKAYQEIKQALLTAPALGLPDLTKPFELFVDEKQGYAKGVLTQKLGPWRRPVAYLSKKLDPVAAGWPPCLRMVAAIAVLTKDAGKLTMGQPLVILAPHAVEALVKQPPDRWLSNARMTHYQAMLLDTDRVQFGPVVALNPATLLPLPEKEAPHDCLEILAETHGTRPDLTDQPIPDADYTWYTDGSSFLQEGQRRAGAAVTTETEVIWARALPAGTSAQRAELIALTQALKMAEGKKLNVYTDSRYAFATAHVHGEIYRRRGWLTSEGREIKNKNEILALLKALFLPKRLSIIHCPGHQKGNSAEARGNRMADQAAREAAMKAVLETSTLLAGKRTADGSEFEKRTADGSEFESPKKKAKVE

SEQ ID NO: 6907 - protein, 2098 aa, synthetic construct
MPAAKRVKLDGGDKKYSIGLDIGTNSVGWAVITDEYKVPSKKFKVLGNTDRHSIKKNLIGALLFDSGETAEATRLKRTARRRYTRRKNRICYLQEIFSNEMAKVDDSFFHRLEESFLVEEDKKHERHPIFGNIVDEVAYHEKYPTIYHLRKKLVDSTDKADLRLIYLALAHMIKFRGHFLIEGDLNPDNSDVDKLFIQLVQTYNQLFEENPINASGVDAKAILSARLSKSRRLENLIAQLPGEKKNGLFGNLIALSLGLTPNFKSNFDLAEDAKLQLSKDTYDDDLDNLLAQIGDQYADLFLAAKNLSDAILLSDILRVNTEITKAPLSASMIKRYDEHHQDLTLLKALVRQQLPEKYKEIFFDQSKNGYAGYIDGGASQEEFYKFIKPILEKMDGTEELLVKLNREDLLRKQRTFDNGSIPHQIHLGELHAILRRQEDFYPFLKDNREKIEKILTFRIPYYVGPLARGNSRFAWMTRKSEETITPWNFEEVVDKGASAQSFIERMTNFDKNLPNEKVLPKHSLLYEYFTVYNELTKVKYVTEGMRKPAFLSGEQKKAIVDLLFKTNRKVTVKQLKEDYFKKIECFDSVEISGVEDRFNASLGTYHDLLKIIKDKDFLDNEENEDILEDIVLTLTLFEDREMIEERLKTYAHLFDDKVMKQLKRRRYTGWGRLSRKLINGIRDKQSGKTILDFLKSDGFANRNFMQLIHDDSLTFKEDIQKAQVSGQGDSLHEHIANLAGSPAIKKGILQTVKVVDELVKVMGRHKPENIVIEMARENQTTQKGQKNSRERMKRIEEGIKELGSQILKEHPVENTQLQNEKLYLYYLQNGRDMYVDQELDINRLSDYDVDHIVPQSFLKDDSIDNKVLTRSDKARGKSDNVPSEEVVKKMKNYWRQLLNAKLITQRKFDNLTKAERGGLSELDKAGFIKRQLVETRQITKHVAQILDSRMNTKYDENDKLIREVKVITLKSKLVSDFRKDFQFYKVREINNYHHAHDAYLNAVVGTALIKKYPKLESEFVYGDYKVYDVRKMIAKSEQEIGKATAKYFFYSNIMNFFKTEITLANGEIRKRPLIETNGETGEIVWDKGRDFATVRKVLSMPQVNIVKKTEVQTGGFSKESILPKRNSDKLIARKKDWDPKKYGGFDSPTVAYSVLVVAKVEKGKSKKLKSVKELLGITIMERSSFEKNPIDFLEAKGYKEVKKDLIIKLPKYSLFELENGRKRMLASAGELQKGNELALPSKYVNFLYLASHYEKLKGSPEDNEQKQLFVEQHKHYLDEIIEQISEFSKRVILADANLDKVLSAYNKHRDKPIREQAENIIHLFTLTNLGAPAAFKYFDTTIDRKRYTSTKEVLDATLIHQSITGLYETRIDLSQLGGDGGGGGGGSEAAAKGGTAPLEEEYRLFLEAPIQNVTLLEQWKREIPKVWAEINPPGLASTQAPIHVQLLSTALPVRVRQYPITLEAKRSLRETIRKFRAAGILRPVHSPWNTPLLPVRKSGTSEYRMVQDLREVNKRVETIHPTVPNPYTLLSLLPPDRIWYSVLDLKDAFFCIPLAPESQLIFAFEWADAEEGESGQLTWTRLPQGFKNSPTLFDEALNRDLQGFRLDHPSVSLLQYVDDLLIAADTQAACLSATRDLLMTLAELGYRVSGKKAQLCQEEVTYLGFKIHKGSRSLSNSRTQAILQIPVPKTKRQVREFLGTIGYCRLWIPGFAELAQPLYAATRGGNDPLVWGEKEEEAFQSLKLALTQPPALALPSLDKPFQLFVEETSGAAKGVLTQALGPWKRPVAYLSKRLDPVAAGWPRCLRAIAAAALLTREASKLTFGQDIEITSSHNLESLLRSPPDKWLTNARITQYQVLLLDPPRVRFKQTAALNPATLLPETDDTLPIHHCLDTLDSLTSTRPDLTDQPLAQAEATLFTDGSSYIRDGKRYAGAAVVTLDSVIWAEPLPIGTSAQKAELIALTKALEWSKDKSVNIYTDSRYAFATLHVHGMIYRERGLLTAGGKAIKNAPEILALLTAVWLPKRVAVMHCKGHQKDDAPTSTGNRRADEVAREVAIRPLSTQATISAGKRTADGSEFEKRTADGSEFESPKKKAKVE

SEQ ID NO: 6908 - protein, 2098 aa, synthetic construct
MPAAKRVKLDGGDKKYSIGLDIGTNSVGWAVITDEYKVPSKKFKVLGNTDRHSIKKNLIGALLFDSGETAEATRLKRTARRRYTRRKNRICYLQEIFSNEMAKVDDSFFHRLEESFLVEEDKKHERHPIFGNIVDEVAYHEKYPTIYHLRKKLVDSTDKADLRLIYLALAHMIKFRGHFLIEGDLNPDNSDVDKLFIQLVQTYNQLFEENPINASGVDAKAILSARLSKSRRLENLIAQLPGEKKNGLFGNLIALSLGLTPNFKSNFDLAEDAKLQLSKDTYDDDLDNLLAQIGDQYADLFLAAKNLSDAILLSDILRVNTEITKAPLSASMIKRYDEHHQDLTLLKALVRQQLPEKYKEIFFDQSKNGYAGYIDGGASQEEFYKFIKPILEKMDGTEELLVKLNREDLLRKQRTFDNGSIPHQIHLGELHAILRRQEDFYPFLKDNREKIEKILTFRIPYYVGPLARGNSRFAWMTRKSEETITPWNFEEVVDKGASAQSFIERMTNFDKNLPNEKVLPKHSLLYEYFTVYNELTKVKYVTEGMRKPAFLSGEQKKAIVDLLFKTNRKVTVKQLKEDYFKKIECFDSVEISGVEDRFNASLGTYHDLLKIIKDKDFLDNEENEDILEDIVLTLTLFEDREMIEERLKTYAHLFDDKVMKQLKRRRYTGWGRLSRKLINGIRDKQSGKTILDFLKSDGFANRNFMQLIHDDSLTFKEDIQKAQVSGQGDSLHEHIANLAGSPAIKKGILQTVKVVDELVKVMGRHKPENIVIEMARENQTTQKGQKNSRERMKRIEEGIKELGSQILKEHPVENTQLQNEKLYLYYLQNGRDMYVDQELDINRLSDYDVDHIVPQSFLKDDSIDNKVLTRSDKARGKSDNVPSEEVVKKMKNYWRQLLNAKLITQRKFDNLTKAERGGLSELDKAGFIKRQLVETRQITKHVAQILDSRMNTKYDENDKLIREVKVITLKSKLVSDFRKDFQFYKVREINNYHHAHDAYLNAVVGTALIKKYPKLESEFVYGDYKVYDVRKMIAKSEQEIGKATAKYFFYSNIMNFFKTEITLANGEIRKRPLIETNGETGEIVWDKGRDFATVRKVLSMPQVNIVKKTEVQTGGFSKESILPKRNSDKLIARKKDWDPKKYGGFDSPTVAYSVLVVAKVEKGKSKKLKSVKELLGITIMERSSFEKNPIDFLEAKGYKEVKKDLIIKLPKYSLFELENGRKRMLASAGELQKGNELALPSKYVNFLYLASHYEKLKGSPEDNEQKQLFVEQHKHYLDEIIEQISEFSKRVILADANLDKVLSAYNKHRDKPIREQAENIIHLFTLTNLGAPAAFKYFDTTIDRKRYTSTKEVLDATLIHQSITGLYETRIDLSQLGGDGGGGGGGSEAAAKGGTAPLEEEYRLFLEAPIQNVTLLEQWKREIPKVWAEINPPGLASTQAPIHVQLLSTALPVRVRQYPITLEAKRSLRETIRKFRAAGILRPVHSPWNTPLLPVRKSGTSEYRMVQDLREVNKRVETIHPTVPNPYTLLSLLPPDRIWYSVLDLKDAFFCIPLAPESQLIFAFEWADAEEGESGQLTWTRLPQGFKNSPTLFNEALNRDLQGFRLDHPSVSLLQYVDDLLIAADTQAACLSATRDLLMTLAELGYRVSGKKAQLCQEEVTYLGFKIHKGSRSLSNSRTQAILQIPVPKTKRQVREFLGTIGYCRLWIPGFAELAQPLYAATRPGNDPLVWGEKEEEAFQSLKLALTQPPALALPSLDKPFQLFVEETSGAAKGVLTQALGPWKRPVAYLSKRLDPVAAGWPRCLRAIAAAALLTREASKLTFGQDIEITSSHNLESLLRSPPDKWLTNARITQYQVLLLDPPRVRFKQTAALNPATLLPETDDTLPIHHCLDTLDSLTSTRPDLTDQPLAQAEATLFTDGSSYIRDGKRYAGAAVVTLDSVIWAEPLPIGTSAQKAELIALTKALEWSKDKSVNIYTDSRYAFATLHVHGMIYRERGWLTAGGKAIKNAPEILALLTAVWLPKRVAVMHCKGHQKDDAPTSTGNRRADEVAREVAIRPLSTQATISAGKRTADGSEFEKRTADGSEFESPKKKAKVE

SEQ ID NO: 6909 - protein, 2102 aa, synthetic construct
MPAAKRVKLDGGDKKYSIGLDIGTNSVGWAVITDEYKVPSKKFKVLGNTDRHSIKKNLIGALLFDSGETAEATRLKRTARRRYTRRKNRICYLQEIFSNEMAKVDDSFFHRLEESFLVEEDKKHERHPIFGNIVDEVAYHEKYPTIYHLRKKLVDSTDKADLRLIYLALAHMIKFRGHFLIEGDLNPDNSDVDKLFIQLVQTYNQLFEENPINASGVDAKAILSARLSKSRRLENLIAQLPGEKKNGLFGNLIALSLGLTPNFKSNFDLAEDAKLQLSKDTYDDDLDNLLAQIGDQYADLFLAAKNLSDAILLSDILRVNTEITKAPLSASMIKRYDEHHQDLTLLKALVRQQLPEKYKEIFFDQSKNGYAGYIDGGASQEEFYKFIKPILEKMDGTEELLVKLNREDLLRKQRTFDNGSIPHQIHLGELHAILRRQEDFYPFLKDNREKIEKILTFRIPYYVGPLARGNSRFAWMTRKSEETITPWNFEEVVDKGASAQSFIERMTNFDKNLPNEKVLPKHSLLYEYFTVYNELTKVKYVTEGMRKPAFLSGEQKKAIVDLLFKTNRKVTVKQLKEDYFKKIECFDSVEISGVEDRFNASLGTYHDLLKIIKDKDFLDNEENEDILEDIVLTLTLFEDREMIEERLKTYAHLFDDKVMKQLKRRRYTGWGRLSRKLINGIRDKQSGKTILDFLKSDGFANRNFMQLIHDDSLTFKEDIQKAQVSGQGDSLHEHIANLAGSPAIKKGILQTVKVVDELVKVMGRHKPENIVIEMARENQTTQKGQKNSRERMKRIEEGIKELGSQILKEHPVENTQLQNEKLYLYYLQNGRDMYVDQELDINRLSDYDVDHIVPQSFLKDDSIDNKVLTRSDKARGKSDNVPSEEVVKKMKNYWRQLLNAKLITQRKFDNLTKAERGGLSELDKAGFIKRQLVETRQITKHVAQILDSRMNTKYDENDKLIREVKVITLKSKLVSDFRKDFQFYKVREINNYHHAHDAYLNAVVGTALIKKYPKLESEFVYGDYKVYDVRKMIAKSEQEIGKATAKYFFYSNIMNFFKTEITLANGEIRKRPLIETNGETGEIVWDKGRDFATVRKVLSMPQVNIVKKTEVQTGGFSKESILPKRNSDKLIARKKDWDPKKYGGFDSPTVAYSVLVVAKVEKGKSKKLKSVKELLGITIMERSSFEKNPIDFLEAKGYKEVKKDLIIKLPKYSLFELENGRKRMLASAGELQKGNELALPSKYVNFLYLASHYEKLKGSPEDNEQKQLFVEQHKHYLDEIIEQISEFSKRVILADANLDKVLSAYNKHRDKPIREQAENIIHLFTLTNLGAPAAFKYFDTTIDRKRYTSTKEVLDATLIHQSITGLYETRIDLSQLGGDGGGGGGGSEAAAKGGTVSLQDEHRLFDIPVTTSLPDVWLQDFPQAWAETGGLGRAKCQAPIIIDLKPTAVPVSIKQYPMSLEAHMGIRQHIIKFLELGVLRPCRSPWNTPLLPVKKPGTQDYRPVQDLREINKRTVDIHPTVPNPYNLLSTLKPDYSWYTVLDLKDAFFCLPLAPQSQELFAFEWKDPERGISGQLTWTRLPQGFKNSPTLFNEALHRDLTDFRTQHPEVTLLQYVDDLLLAAPTKKACTQGTRHLLQELGEKGYRASAKKAQICQTKVTYLGYILSEGKRWLTPGRIETVARIPPPRNPREVREFLGTAGFCRLWIPGFAELAAPLYALTKPSTPFTWQTEHQLAFEALKKALLSAPALGLPDTSKPFTLFLDERQGIAKGVLTQKLGPWKRPVAYLSKKLDPVAAGWPPCLRIMAATAMLVKDSAKLTLGQPLTVITPHTLEAIVRQPPDRWITNARLTHYQALLLDTDRVQFGPPVTLNPATLLPVPENQPSPHDCRQVLAETHGTREDLKDQELPDADHTWYTDGSSYLDSGTRRAGAAVVDGHNTIWAQSLPPGTSAQKAELIALTKALELSKGKKANIYTDSRYAFATAHTHGSIYERRGWLTSEGKEIKNKAEIIALLKALFLPQEVAIIHCPGHQKGQDPVAVGNRQADRVARQAAMAEVLTLATEPDNTSHITAGKRTADGSEFEKRTADGSEFESPKKKAKVE

SEQ ID NO: 6910 - protein, 2173 aa, synthetic construct
MPAAKRVKLDGGDKKYSIGLDIGTNSVGWAVITDEYKVPSKKFKVLGNTDRHSIKKNLIGALLFDSGETAEATRLKRTARRRYTRRKNRICYLQEIFSNEMAKVDDSFFHRLEESFLVEEDKKHERHPIFGNIVDEVAYHEKYPTIYHLRKKLVDSTDKADLRLIYLALAHMIKFRGHFLIEGDLNPDNSDVDKLFIQLVQTYNQLFEENPINASGVDAKAILSARLSKSRRLENLIAQLPGEKKNGLFGNLIALSLGLTPNFKSNFDLAEDAKLQLSKDTYDDDLDNLLAQIGDQYADLFLAAKNLSDAILLSDILRVNTEITKAPLSASMIKRYDEHHQDLTLLKALVRQQLPEKYKEIFFDQSKNGYAGYIDGGASQEEFYKFIKPILEKMDGTEELLVKLNREDLLRKQRTFDNGSIPHQIHLGELHAILRRQEDFYPFLKDNREKIEKILTFRIPYYVGPLARGNSRFAWMTRKSEETITPWNFEEVVDKGASAQSFIERMTNFDKNLPNEKVLPKHSLLYEYFTVYNELTKVKYVTEGMRKPAFLSGEQKKAIVDLLFKTNRKVTVKQLKEDYFKKIECFDSVEISGVEDRFNASLGTYHDLLKIIKDKDFLDNEENEDILEDIVLTLTLFEDREMIEERLKTYAHLFDDKVMKQLKRRRYTGWGRLSRKLINGIRDKQSGKTILDFLKSDGFANRNFMQLIHDDSLTFKEDIQKAQVSGQGDSLHEHIANLAGSPAIKKGILQTVKVVDELVKVMGRHKPENIVIEMARENQTTQKGQKNSRERMKRIEEGIKELGSQILKEHPVENTQLQNEKLYLYYLQNGRDMYVDQELDINRLSDYDVDHIVPQSFLKDDSIDNKVLTRSDKARGKSDNVPSEEVVKKMKNYWRQLLNAKLITQRKFDNLTKAERGGLSELDKAGFIKRQLVETRQITKHVAQILDSRMNTKYDENDKLIREVKVITLKSKLVSDFRKDFQFYKVREINNYHHAHDAYLNAVVGTALIKKYPKLESEFVYGDYKVYDVRKMIAKSEQEIGKATAKYFFYSNIMNFFKTEITLANGEIRKRPLIETNGETGEIVWDKGRDFATVRKVLSMPQVNIVKKTEVQTGGFSKESILPKRNSDKLIARKKDWDPKKYGGFDSPTVAYSVLVVAKVEKGKSKKLKSVKELLGITIMERSSFEKNPIDFLEAKGYKEVKKDLIIKLPKYSLFELENGRKRMLASAGELQKGNELALPSKYVNFLYLASHYEKLKGSPEDNEQKQLFVEQHKHYLDEIIEQISEFSKRVILADANLDKVLSAYNKHRDKPIREQAENIIHLFTLTNLGAPAAFKYFDTTIDRKRYTSTKEVLDATLIHQSITGLYETRIDLSQLGGDGGGGGGGSEAAAKGGMDLLKPLTVERKGVKIKGYWNSQADITCVPKDLLQGEEPVRQQNVTTIHGTQEGDVYYVNLKIDGRRINTEVIGTTLDYAIITPGDVPWILKKPLELTIKLDLEEQQGTLLNNSILSKKGKEELKQLFEKYSALWQSWENQVGHRRIRPHKIATGTVKPTPQKQYHINPKAKPDIQIVINDLLKQGVLIQKESTMNTPVYPVPKPNGRWRMVLDYRAVNKVTPLIAVQNQHSYGILGSLFKGRYKTTIDLSNGFWAHPIVPEDYWITAFTWQGKQYCWTVLPQGFLNSPGLFTGDVVDLLQGIPNVEVYVDDVYISHDSEKEHLEYLDILFNRLKEAGYIISLKKSNIANSIVDFLGFQITNEGRGLTDTFKEKLENITAPTTLKQLQSILGLLNFARNFIPDFTELIAPLYALIPKSTKNYVPWQIEHSTTLETLITKLNGAEYLQGRKGDKTLIMKVNASYTTGYIRYYNEGEKKPISYVSIVFSKTELKFTELEKLLTTVHKGLLKALDLSMGQNIHVYSPIVSMQNIQKTPQTAKKALASRWLSWLSYLEDPRIRFFYDPQMPALKDLPAVDTGKDNKKHPSNFQHIFYTDGSAITSPTKEGHLNAGMGIVYFINKDGNLQKQQEWSISLGNHTAQFAEIAAFEFALKKCLPLGGNILVVTDSNYVAKAYNEELDVWASNGFVNNRKKPLKHISKWKSVADLKRLRPDVVVTHEPGHQKLDSSPHAYGNNLADQLATQASFKVHAGKRTADGSEFEKRTADGSEFESPKKKAKVE

SEQ ID NO: 6911 - protein, 2095 aa, synthetic construct
MPAAKRVKLDGGDKKYSIGLDIGTNSVGWAVITDEYKVPSKKFKVLGNTDRHSIKKNLIGALLFDSGETAEATRLKRTARRRYTRRKNRICYLQEIFSNEMAKVDDSFFHRLEESFLVEEDKKHERHPIFGNIVDEVAYHEKYPTIYHLRKKLVDSTDKADLRLIYLALAHMIKFRGHFLIEGDLNPDNSDVDKLFIQLVQTYNQLFEENPINASGVDAKAILSARLSKSRRLENLIAQLPGEKKNGLFGNLIALSLGLTPNFKSNFDLAEDAKLQLSKDTYDDDLDNLLAQIGDQYADLFLAAKNLSDAILLSDILRVNTEITKAPLSASMIKRYDEHHQDLTLLKALVRQQLPEKYKEIFFDQSKNGYAGYIDGGASQEEFYKFIKPILEKMDGTEELLVKLNREDLLRKQRTFDNGSIPHQIHLGELHAILRRQEDFYPFLKDNREKIEKILTFRIPYYVGPLARGNSRFAWMTRKSEETITPWNFEEVVDKGASAQSFIERMTNFDKNLPNEKVLPKHSLLYEYFTVYNELTKVKYVTEGMRKPAFLSGEQKKAIVDLLFKTNRKVTVKQLKEDYFKKIECFDSVEISGVEDRFNASLGTYHDLLKIIKDKDFLDNEENEDILEDIVLTLTLFEDREMIEERLKTYAHLFDDKVMKQLKRRRYTGWGRLSRKLINGIRDKQSGKTILDFLKSDGFANRNFMQLIHDDSLTFKEDIQKAQVSGQGDSLHEHIANLAGSPAIKKGILQTVKVVDELVKVMGRHKPENIVIEMARENQTTQKGQKNSRERMKRIEEGIKELGSQILKEHPVENTQLQNEKLYLYYLQNGRDMYVDQELDINRLSDYDVDHIVPQSFLKDDSIDNKVLTRSDKARGKSDNVPSEEVVKKMKNYWRQLLNAKLITQRKFDNLTKAERGGLSELDKAGFIKRQLVETRQITKHVAQILDSRMNTKYDENDKLIREVKVITLKSKLVSDFRKDFQFYKVREINNYHHAHDAYLNAVVGTALIKKYPKLESEFVYGDYKVYDVRKMIAKSEQEIGKATAKYFFYSNIMNFFKTEITLANGEIRKRPLIETNGETGEIVWDKGRDFATVRKVLSMPQVNIVKKTEVQTGGFSKESILPKRNSDKLIARKKDWDPKKYGGFDSPTVAYSVLVVAKVEKGKSKKLKSVKELLGITIMERSSFEKNPIDFLEAKGYKEVKKDLIIKLPKYSLFELENGRKRMLASAGELQKGNELALPSKYVNFLYLASHYEKLKGSPEDNEQKQLFVEQHKHYLDEIIEQISEFSKRVILADANLDKVLSAYNKHRDKPIREQAENIIHLFTLTNLGAPAAFKYFDTTIDRKRYTSTKEVLDATLIHQSITGLYETRIDLSQLGGDGGGGGGGSEAAAKGGTLQLEEEYRLFEPESTQKQEMDIWLKNFPQAWAETGGMGTAHCQAPVLIQLKATATPISIRQYPMPHEAYQGIKPHIRRMLDQGILKPCQSPWNTPLLPVKKPGTEDYRPVQDLREVNKRVEDIHPTVPNPYNLLSTLPPSHPWYTVLDLKDAFFCLRLHSESQLLFAFEWRDPEIGLSGQLTWTRLPQGFKNSPTLFNEALHSDLADFRVRYPALVLLQYVDDLLLAAATRTECLEGTKALLETLGNKGYRASAKKAQICLQEVTYLGYSLKDGQRWLTKARKEAILSIPVPKNSRQVREFLGKAGYCRLFIPGFAELAAPLYPLTRPGTLFQWGTEQQLAFEDIKKALLSSPALGLPDITKPFELFIDENSGFAKGVLVQKLGPWKRPVAYLSKKLDTVASGWPPCLRMVAAIAILVKDAGKLTLGQPLTILTSHPVEALVRQPPNKWLSNARMTHYQAMLLDAERVHFGPTVSLNPATLLPLPSGGNHHDCLQILAETHGTRPDLTDQPLPDADLTWYTDGSSFIRNGEREAGAAVTTESEVIWAAPLPPGTSAQRAELIALTQALKMAEGKKLTVYTDSRYAFATTHVHGEIYRRRGWLTSEGKEIKNKNEILALLEALFLPKRLSIIHCPGHQKGDSPQAKGNRLADDTAKKAATETHSSLTVLPAGKRTADGSEFEKRTADGSEFESPKKKAKVE

SEQ ID NO: 6912 - protein, 2176 aa, synthetic construct
MPAAKRVKLDGGDKKYSIGLDIGTNSVGWAVITDEYKVPSKKFKVLGNTDRHSIKKNLIGALLFDSGETAEATRLKRTARRRYTRRKNRICYLQEIFSNEMAKVDDSFFHRLEESFLVEEDKKHERHPIFGNIVDEVAYHEKYPTIYHLRKKLVDSTDKADLRLIYLALAHMIKFRGHFLIEGDLNPDNSDVDKLFIQLVQTYNQLFEENPINASGVDAKAILSARLSKSRRLENLIAQLPGEKKNGLFGNLIALSLGLTPNFKSNFDLAEDAKLQLSKDTYDDDLDNLLAQIGDQYADLFLAAKNLSDAILLSDILRVNTEITKAPLSASMIKRYDEHHQDLTLLKALVRQQLPEKYKEIFFDQSKNGYAGYIDGGASQEEFYKFIKPILEKMDGTEELLVKLNREDLLRKQRTFDNGSIPHQIHLGELHAILRRQEDFYPFLKDNREKIEKILTFRIPYYVGPLARGNSRFAWMTRKSEETITPWNFEEVVDKGASAQSFIERMTNFDKNLPNEKVLPKHSLLYEYFTVYNELTKVKYVTEGMRKPAFLSGEQKKAIVDLLFKTNRKVTVKQLKEDYFKKIECFDSVEISGVEDRFNASLGTYHDLLKIIKDKDFLDNEENEDILEDIVLTLTLFEDREMIEERLKTYAHLFDDKVMKQLKRRRYTGWGRLSRKLINGIRDKQSGKTILDFLKSDGFANRNFMQLIHDDSLTFKEDIQKAQVSGQGDSLHEHIANLAGSPAIKKGILQTVKVVDELVKVMGRHKPENIVIEMARENQTTQKGQKNSRERMKRIEEGIKELGSQILKEHPVENTQLQNEKLYLYYLQNGRDMYVDQELDINRLSDYDVDHIVPQSFLKDDSIDNKVLTRSDKARGKSDNVPSEEVVKKMKNYWRQLLNAKLITQRKFDNLTKAERGGLSELDKAGFIKRQLVETRQITKHVAQILDSRMNTKYDENDKLIREVKVITLKSKLVSDFRKDFQFYKVREINNYHHAHDAYLNAVVGTALIKKYPKLESEFVYGDYKVYDVRKMIAKSEQEIGKATAKYFFYSNIMNFFKTEITLANGEIRKRPLIETNGETGEIVWDKGRDFATVRKVLSMPQVNIVKKTEVQTGGFSKESILPKRNSDKLIARKKDWDPKKYGGFDSPTVAYSVLVVAKVEKGKSKKLKSVKELLGITIMERSSFEKNPIDFLEAKGYKEVKKDLIIKLPKYSLFELENGRKRMLASAGELQKGNELALPSKYVNFLYLASHYEKLKGSPEDNEQKQLFVEQHKHYLDEIIEQISEFSKRVILADANLDKVLSAYNKHRDKPIREQAENIIHLFTLTNLGAPAAFKYFDTTIDRKRYTSTKEVLDATLIHQSITGLYETRIDLSQLGGDGGGGGGGSEAAAKGGMNPLQLLQPLPAEIKGTKLLAHWNSGATITCIPESFLEDEQPIKKTLIKTIHGEKQQNVYYVTFKVKGRKVEAEVIASPYEYILLSPTDVPWLTQQPLQLTILVPLQEYQEKILSKTALPEDQKQQLKTLFVKYDNLWQHWENQVGHRKIRPHNIATGDYPPRPQKQYPINPKAKPSIQIVIDDLLKQGVLTPQNSTMNTPVYPVPKPDGRWRMVLDYREVNKTIPLTAAQNQHSAGILATIVRQKYKTTLDLANGFWAHPITPESYWLTAFTWQGKQYCWTRLPQGFLNSPALFTADVVDLLKEIPNVQVYVDDIYLSHDDPKEHVQQLEKVFQILLQAGYVVSLKKSEIGQKTVEFLGFNITKEGRGLTDTFKTKLLNITPPKDLKQLQSILGLLNFARNFIPNFAELVQPLYNLIASAKGKYIEWSEENTKQLNMVIEALNTASNLEERLPEQRLVIKVNTSPSAGYVRYYNETGKKPIMYLNYVFSKAELKFSMLEKLLTTMHKALIKAMDLAMGQEILVYSPIVSMTKIQKTPLPERKALPIRWITWMTYLEDPRIQFHYDKTLPELKHIPDVYTSSQSPVKHPSQYEGVFYTDGSAIKSPDPTKSNNAGMGIVHATYKPEYQVLNQWSIPLGNHTAQMAEIAAVEFACKKALKIPGPVLVITDSFYVAESANKELPYWKSNGFVNNKKKPLKHISKWKSIAECLSMKPDITIQHEKGISLQIPVFILKGNALADKLATQGSYVVNAGKRTADGSEFEKRTADGSEFESPKKKAKVE

SEQ ID NO: 6913 - protein, 2176 aa, synthetic construct
MPAAKRVKLDGGDKKYSIGLDIGTNSVGWAVITDEYKVPSKKFKVLGNTDRHSIKKNLIGALLFDSGETAEATRLKRTARRRYTRRKNRICYLQEIFSNEMAKVDDSFFHRLEESFLVEEDKKHERHPIFGNIVDEVAYHEKYPTIYHLRKKLVDSTDKADLRLIYLALAHMIKFRGHFLIEGDLNPDNSDVDKLFIQLVQTYNQLFEENPINASGVDAKAILSARLSKSRRLENLIAQLPGEKKNGLFGNLIALSLGLTPNFKSNFDLAEDAKLQLSKDTYDDDLDNLLAQIGDQYADLFLAAKNLSDAILLSDILRVNTEITKAPLSASMIKRYDEHHQDLTLLKALVRQQLPEKYKEIFFDQSKNGYAGYIDGGASQEEFYKFIKPILEKMDGTEELLVKLNREDLLRKQRTFDNGSIPHQIHLGELHAILRRQEDFYPFLKDNREKIEKILTFRIPYYVGPLARGNSRFAWMTRKSEETITPWNFEEVVDKGASAQSFIERMTNFDKNLPNEKVLPKHSLLYEYFTVYNELTKVKYVTEGMRKPAFLSGEQKKAIVDLLFKTNRKVTVKQLKEDYFKKIECFDSVEISGVEDRFNASLGTYHDLLKIIKDKDFLDNEENEDILEDIVLTLTLFEDREMIEERLKTYAHLFDDKVMKQLKRRRYTGWGRLSRKLINGIRDKQSGKTILDFLKSDGFANRNFMQLIHDDSLTFKEDIQKAQVSGQGDSLHEHIANLAGSPAIKKGILQTVKVVDELVKVMGRHKPENIVIEMARENQTTQKGQKNSRERMKRIEEGIKELGSQILKEHPVENTQLQNEKLYLYYLQNGRDMYVDQELDINRLSDYDVDHIVPQSFLKDDSIDNKVLTRSDKARGKSDNVPSEEVVKKMKNYWRQLLNAKLITQRKFDNLTKAERGGLSELDKAGFIKRQLVETRQITKHVAQILDSRMNTKYDENDKLIREVKVITLKSKLVSDFRKDFQFYKVREINNYHHAHDAYLNAVVGTALIKKYPKLESEFVYGDYKVYDVRKMIAKSEQEIGKATAKYFFYSNIMNFFKTEITLANGEIRKRPLIETNGETGEIVWDKGRDFATVRKVLSMPQVNIVKKTEVQTGGFSKESILPKRNSDKLIARKKDWDPKKYGGFDSPTVAYSVLVVAKVEKGKSKKLKSVKELLGITIMERSSFEKNPIDFLEAKGYKEVKKDLIIKLPKYSLFELENGRKRMLASAGELQKGNELALPSKYVNFLYLASHYEKLKGSPEDNEQKQLFVEQHKHYLDEIIEQISEFSKRVILADANLDKVLSAYNKHRDKPIREQAENIIHLFTLTNLGAPAAFKYFDTTIDRKRYTSTKEVLDATLIHQSITGLYETRIDLSQLGGDGGGGGGGSEAAAKGGMNPLQLLQPLPAEIKGTKLLAHWNSGATITCIPESFLEDEQPIKKTLIKTIHGEKQQNVYYVTFKVKGRKVEAEVIASPYEYILLSPTDVPWLTQQPLQLTILVPLQEYQEKILSKTALPEDQKQQLKTLFVKYDNLWQHWENQVGHRKIRPHNIATGDYPPRPQKQYPINPKAKPSIQIVIDDLLKQGVLTPQNSTMNTPVYPVPKPDGRWRMVLDYREVNKTIPLTAAQNQHSAGILATIVRQKYKTTLDLANGFWAHPITPESYWLTAFTWQGKQYCWTRLPQGFLNSPALFNADVVDLLKEIPNVQVYVDDIYLSHDDPKEHVQQLEKVFQILLQAGYVVSLKKSEIGQKTVEFLGFNITKEGRGLTDTFKTKLLNITPPKDLKQLQSILGKLNFARNFIPNFAELVQPLYNLIAPAKGKYIEWSEENTKQLNMVIEALNTASNLEERLPEQRLVIKVNTSPSAGYVRYYNETGKKPIMYLNYVFSKAELKFSMLEKLLTTMHKALIKAMDLAMGQEILVYSPIVSMTKIQKTPLPERKALPIRWITWMTYLEDPRIQFHYDKTLPELKHIPDVYTSSQSPVKHPSQYEGVFYTDGSAIKSPDPTKSNNAGMGIVHATYKPEYQVLNQWSIPLGNHTAQMAEIAAVEFACKKALKIPGPVLVITDSFYVAESANKELPYWKSNGFVNNKKKPLKHISKWKSIAECLSMKPDITIQHEKGISLQIPVFILKGNALADKLATQGSYVVNAGKRTADGSEFEKRTADGSEFESPKKKAKVE

SEQ ID NO: 6914 - protein, 2218 aa, synthetic construct
MPAAKRVKLDGGDKKYSIGLDIGTNSVGWAVITDEYKVPSKKFKVLGNTDRHSIKKNLIGALLFDSGETAEATRLKRTARRRYTRRKNRICYLQEIFSNEMAKVDDSFFHRLEESFLVEEDKKHERHPIFGNIVDEVAYHEKYPTIYHLRKKLVDSTDKADLRLIYLALAHMIKFRGHFLIEGDLNPDNSDVDKLFIQLVQTYNQLFEENPINASGVDAKAILSARLSKSRRLENLIAQLPGEKKNGLFGNLIALSLGLTPNFKSNFDLAEDAKLQLSKDTYDDDLDNLLAQIGDQYADLFLAAKNLSDAILLSDILRVNTEITKAPLSASMIKRYDEHHQDLTLLKALVRQQLPEKYKEIFFDQSKNGYAGYIDGGASQEEFYKFIKPILEKMDGTEELLVKLNREDLLRKQRTFDNGSIPHQIHLGELHAILRRQEDFYPFLKDNREKIEKILTFRIPYYVGPLARGNSRFAWMTRKSEETITPWNFEEVVDKGASAQSFIERMTNFDKNLPNEKVLPKHSLLYEYFTVYNELTKVKYVTEGMRKPAFLSGEQKKAIVDLLFKTNRKVTVKQLKEDYFKKIECFDSVEISGVEDRFNASLGTYHDLLKIIKDKDFLDNEENEDILEDIVLTLTLFEDREMIEERLKTYAHLFDDKVMKQLKRRRYTGWGRLSRKLINGIRDKQSGKTILDFLKSDGFANRNFMQLIHDDSLTFKEDIQKAQVSGQGDSLHEHIANLAGSPAIKKGILQTVKVVDELVKVMGRHKPENIVIEMARENQTTQKGQKNSRERMKRIEEGIKELGSQILKEHPVENTQLQNEKLYLYYLQNGRDMYVDQELDINRLSDYDVDHIVPQSFLKDDSIDNKVLTRSDKARGKSDNVPSEEVVKKMKNYWRQLLNAKLITQRKFDNLTKAERGGLSELDKAGFIKRQLVETRQITKHVAQILDSRMNTKYDENDKLIREVKVITLKSKLVSDFRKDFQFYKVREINNYHHAHDAYLNAVVGTALIKKYPKLESEFVYGDYKVYDVRKMIAKSEQEIGKATAKYFFYSNIMNFFKTEITLANGEIRKRPLIETNGETGEIVWDKGRDFATVRKVLSMPQVNIVKKTEVQTGGFSKESILPKRNSDKLIARKKDWDPKKYGGFDSPTVAYSVLVVAKVEKGKSKKLKSVKELLGITIMERSSFEKNPIDFLEAKGYKEVKKDLIIKLPKYSLFELENGRKRMLASAGELQKGNELALPSKYVNFLYLASHYEKLKGSPEDNEQKQLFVEQHKHYLDEIIEQISEFSKRVILADANLDKVLSAYNKHRDKPIREQAENIIHLFTLTNLGAPAAFKYFDTTIDRKRYTSTKEVLDATLIHQSITGLYETRIDLSQLGGDGGGGGGGSEAAAKGGTLGDQGSRGSDPLPEPRVTLTVEGIPTEFLVNTGAEHSVLTKPMGKMGSKRTVVAGATGSKVYPWTTKRLLKIGQKQVTHSFLVIPECPAPLLGRDLLTKLKAQIQFSTEGPQVTWEDRPAMCLVLNLEEEYRLHEKPVPPSIDPSWLQLFPMVWAEKAGMGLANQVPPVVVELKSDASPVAVRQYPMSKEAREGIRPHIQRFLDLGILVPCQSPWNTPLLPVKKPGTNDYRPVQDLREVNKRVQDIHPTVPNPYNLLSSLPPSHTWYSVLDLKDAFFCLKLHPNSQPLFAFEWRDPEKGNTGQLTWTRLPQGFKNSPTLFDEALHRDLASFRALNPQVVMLQYVDDLLVAAPTYRDCKEGTRRLLQELSKLGYRVSAKKAQLCREEVTYLGYLLKGGKRWLTPARKATVMKIPTPTTPRQVREFLGTAGFCRLWIPGFASLAAPLYPLTREKVPFTWTEAHQEAFGRIKEALLSAPALALPDLTKPFALYVDEKEGVARGVLTQTLGPWRRPVAYLSKKLDPVASGWPTCLKAIAAVALLLKDADKLTLGQNVLVIAPHNLESIVRQPPDRWMTNARMTHYQSLLLNERVSFAPPAILNPATLLPVESDDTPIHICSEILAEETGTRPDLRDQPLPGVPAWYTDGSSFIMDGRRQAGAAIVDNKRTVWASNLPEGTSAQKAELIALTQALRLAEGKSINIYTDSRYAFATAHVHGAIYKQRGLLTSAGKDIKNKEEILALLEAIHLPKRVAIIHCPGHQRGTDPVATGNRKADEAAKQAAQSTRILTETTKNAGKRTADGSEFEKRTADGSEFESPKKKAKVE

SEQ ID NO: 6915 - protein, 2127 aa, synthetic construct
MPAAKRVKLDGGDKKYSIGLDIGTNSVGWAVITDEYKVPSKKFKVLGNTDRHSIKKNLIGALLFDSGETAEATRLKRTARRRYTRRKNRICYLQEIFSNEMAKVDDSFFHRLEESFLVEEDKKHERHPIFGNIVDEVAYHEKYPTIYHLRKKLVDSTDKADLRLIYLALAHMIKFRGHFLIEGDLNPDNSDVDKLFIQLVQTYNQLFEENPINASGVDAKAILSARLSKSRRLENLIAQLPGEKKNGLFGNLIALSLGLTPNFKSNFDLAEDAKLQLSKDTYDDDLDNLLAQIGDQYADLFLAAKNLSDAILLSDILRVNTEITKAPLSASMIKRYDEHHQDLTLLKALVRQQLPEKYKEIFFDQSKNGYAGYIDGGASQEEFYKFIKPILEKMDGTEELLVKLNREDLLRKQRTFDNGSIPHQIHLGELHAILRRQEDFYPFLKDNREKIEKILTFRIPYYVGPLARGNSRFAWMTRKSEETITPWNFEEVVDKGASAQSFIERMTNFDKNLPNEKVLPKHSLLYEYFTVYNELTKVKYVTEGMRKPAFLSGEQKKAIVDLLFKTNRKVTVKQLKEDYFKKIECFDSVEISGVEDRFNASLGTYHDLLKIIKDKDFLDNEENEDILEDIVLTLTLFEDREMIEERLKTYAHLFDDKVMKQLKRRRYTGWGRLSRKLINGIRDKQSGKTILDFLKSDGFANRNFMQLIHDDSLTFKEDIQKAQVSGQGDSLHEHIANLAGSPAIKKGILQTVKVVDELVKVMGRHKPENIVIEMARENQTTQKGQKNSRERMKRIEEGIKELGSQILKEHPVENTQLQNEKLYLYYLQNGRDMYVDQELDINRLSDYDVDHIVPQSFLKDDSIDNKVLTRSDKARGKSDNVPSEEVVKKMKNYWRQLLNAKLITQRKFDNLTKAERGGLSELDKAGFIKRQLVETRQITKHVAQILDSRMNTKYDENDKLIREVKVITLKSKLVSDFRKDFQFYKVREINNYHHAHDAYLNAVVGTALIKKYPKLESEFVYGDYKVYDVRKMIAKSEQEIGKATAKYFFYSNIMNFFKTEITLANGEIRKRPLIETNGETGEIVWDKGRDFATVRKVLSMPQVNIVKKTEVQTGGFSKESILPKRNSDKLIARKKDWDPKKYGGFDSPTVAYSVLVVAKVEKGKSKKLKSVKELLGITIMERSSFEKNPIDFLEAKGYKEVKKDLIIKLPKYSLFELENGRKRMLASAGELQKGNELALPSKYVNFLYLASHYEKLKGSPEDNEQKQLFVEQHKHYLDEIIEQISEFSKRVILADANLDKVLSAYNKHRDKPIREQAENIIHLFTLTNLGAPAAFKYFDTTIDRKRYTSTKEVLDATLIHQSITGLYETRIDLSQLGGDGGGGGGGSEAAAKGGLLGRDLLTKLKAQIQFSTEGPQVTWEDRPAMCLVLNLEEEYRLHEKPVPPSIDPSWLQLFPMVWAEKAGMGLANQVPPVVVELKSDASPVAVRQYPMSKEAREGIRPHIQRFLDLGILVPCQSPWNTPLLPVKKPGTNDYRPVQDLREVNKRVQDIHPTVPNPYNLLSSLPPSHTWYSVLDLKDAFFCLKLHPNSQPLFAFEWRDPEKGNTGQLTWTRLPQGFKNSPTLFNEALHRDLASFRALNPQVVMLQYVDDLLVAAPTYRDCKEGTRRLLQELSKLGYRVSAKKAQLCREEVTYLGYLLKGGKRWLTPARKATVMKIPTPTTPRQVREFLGTAGFCRLWIPGFASLAAPLYPLTRPKVPFTWTEAHQEAFGRIKEALLSAPALALPDLTKPFALYVDEKEGVARGVLTQTLGPWRRPVAYLSKKLDPVASGWPTCLKAIAAVALLLKDADKLTLGQNVLVIAPHNLESIVRQPPDRWMTNARMTHYQSLLLNERVSFAPPAILNPATLLPVESDDTPIHICSEILAEETGTRPDLRDQPLPGVPAWYTDGSSFIMDGRRQAGAAIVDNKRTVWASNLPEGTSAQKAELIALTQALRLAEGKSINIYTDSRYAFATAHVHGAIYKQRGWLTSAGKDIKNKEEILALLEAIHLPKRVAIIHCPGHQRGTDPVATGNRKADEAAKQAAQSTRILTETTKNAGKRTADGSEFEKRTADGSEFESPKKKAKVE

SEQ ID NO: 6916 - protein, 2218 aa, synthetic construct
MPAAKRVKLDGGDKKYSIGLDIGTNSVGWAVITDEYKVPSKKFKVLGNTDRHSIKKNLIGALLFDSGETAEATRLKRTARRRYTRRKNRICYLQEIFSNEMAKVDDSFFHRLEESFLVEEDKKHERHPIFGNIVDEVAYHEKYPTIYHLRKKLVDSTDKADLRLIYLALAHMIKFRGHFLIEGDLNPDNSDVDKLFIQLVQTYNQLFEENPINASGVDAKAILSARLSKSRRLENLIAQLPGEKKNGLFGNLIALSLGLTPNFKSNFDLAEDAKLQLSKDTYDDDLDNLLAQIGDQYADLFLAAKNLSDAILLSDILRVNTEITKAPLSASMIKRYDEHHQDLTLLKALVRQQLPEKYKEIFFDQSKNGYAGYIDGGASQEEFYKFIKPILEKMDGTEELLVKLNREDLLRKQRTFDNGSIPHQIHLGELHAILRRQEDFYPFLKDNREKIEKILTFRIPYYVGPLARGNSRFAWMTRKSEETITPWNFEEVVDKGASAQSFIERMTNFDKNLPNEKVLPKHSLLYEYFTVYNELTKVKYVTEGMRKPAFLSGEQKKAIVDLLFKTNRKVTVKQLKEDYFKKIECFDSVEISGVEDRFNASLGTYHDLLKIIKDKDFLDNEENEDILEDIVLTLTLFEDREMIEERLKTYAHLFDDKVMKQLKRRRYTGWGRLSRKLINGIRDKQSGKTILDFLKSDGFANRNFMQLIHDDSLTFKEDIQKAQVSGQGDSLHEHIANLAGSPAIKKGILQTVKVVDELVKVMGRHKPENIVIEMARENQTTQKGQKNSRERMKRIEEGIKELGSQILKEHPVENTQLQNEKLYLYYLQNGRDMYVDQELDINRLSDYDVDHIVPQSFLKDDSIDNKVLTRSDKARGKSDNVPSEEVVKKMKNYWRQLLNAKLITQRKFDNLTKAERGGLSELDKAGFIKRQLVETRQITKHVAQILDSRMNTKYDENDKLIREVKVITLKSKLVSDFRKDFQFYKVREINNYHHAHDAYLNAVVGTALIKKYPKLESEFVYGDYKVYDVRKMIAKSEQEIGKATAKYFFYSNIMNFFKTEITLANGEIRKRPLIETNGETGEIVWDKGRDFATVRKVLSMPQVNIVKKTEVQTGGFSKESILPKRNSDKLIARKKDWDPKKYGGFDSPTVAYSVLVVAKVEKGKSKKLKSVKELLGITIMERSSFEKNPIDFLEAKGYKEVKKDLIIKLPKYSLFELENGRKRMLASAGELQKGNELALPSKYVNFLYLASHYEKLKGSPEDNEQKQLFVEQHKHYLDEIIEQISEFSKRVILADANLDKVLSAYNKHRDKPIREQAENIIHLFTLTNLGAPAAFKYFDTTIDRKRYTSTKEVLDATLIHQSITGLYETRIDLSQLGGDGGGGGGGSEAAAKGGTLGDQGSRGSDPLPEPRVTLTVEGIPTEFLVNTGAEHSVLTKPMGKMGSKRTVVAGATGSKVYPWTTKRLLKIGQKQVTHSFLVIPECPAPLLGRDLLTKLKAQIQFSTEGPQVTWEDRPAMCLVLNLEEEYRLHEKPVPPSIDPSWLQLFPMVWAEKAGMGLANQVPPVVVELKSDASPVAVRQYPMSKEAREGIRPHIQRFLDLGILVPCQSPWNTPLLPVKKPGTNDYRPVQDLREVNKRVQDIHPTVPNPYNLLSSLPPSHTWYSVLDLKDAFFCLKLHPNSQPLFAFEWRDPEKGNTGQLTWTRLPQGFKNSPTLFNEALHRDLASFRALNPQVVMLQYVDDLLVAAPTYRDCKEGTRRLLQELSKLGYRVSAKKAQLCREEVTYLGYLLKGGKRWLTPARKATVMKIPTPTTPRQVREFLGTAGFCRLWIPGFASLAAPLYPLTRPKVPFTWTEAHQEAFGRIKEALLSAPALALPDLTKPFALYVDEKEGVARGVLTQTLGPWRRPVAYLSKKLDPVASGWPTCLKAIAAVALLLKDADKLTLGQNVLVIAPHNLESIVRQPPDRWMTNARMTHYQSLLLNERVSFAPPAILNPATLLPVESDDTPIHICSEILAEETGTRPDLRDQPLPGVPAWYTDGSSFIMDGRRQAGAAIVDNKRTVWASNLPEGTSAQKAELIALTQALRLAEGKSINIYTDSRYAFATAHVHGAIYKQRGWLTSAGKDIKNKEEILALLEAIHLPKRVAIIHCPGHQRGTDPVATGNRKADEAAKQAAQSTRILTETTKNAGKRTADGSEFEKRTADGSEFESPKKKAKVE

SEQ ID NO: 6917 - protein, 2096 aa, synthetic construct
MPAAKRVKLDGGDKKYSIGLDIGTNSVGWAVITDEYKVPSKKFKVLGNTDRHSIKKNLIGALLFDSGETAEATRLKRTARRRYTRRKNRICYLQEIFSNEMAKVDDSFFHRLEESFLVEEDKKHERHPIFGNIVDEVAYHEKYPTIYHLRKKLVDSTDKADLRLIYLALAHMIKFRGHFLIEGDLNPDNSDVDKLFIQLVQTYNQLFEENPINASGVDAKAILSARLSKSRRLENLIAQLPGEKKNGLFGNLIALSLGLTPNFKSNFDLAEDAKLQLSKDTYDDDLDNLLAQIGDQYADLFLAAKNLSDAILLSDILRVNTEITKAPLSASMIKRYDEHHQDLTLLKALVRQQLPEKYKEIFFDQSKNGYAGYIDGGASQEEFYKFIKPILEKMDGTEELLVKLNREDLLRKQRTFDNGSIPHQIHLGELHAILRRQEDFYPFLKDNREKIEKILTFRIPYYVGPLARGNSRFAWMTRKSEETITPWNFEEVVDKGASAQSFIERMTNFDKNLPNEKVLPKHSLLYEYFTVYNELTKVKYVTEGMRKPAFLSGEQKKAIVDLLFKTNRKVTVKQLKEDYFKKIECFDSVEISGVEDRFNASLGTYHDLLKIIKDKDFLDNEENEDILEDIVLTLTLFEDREMIEERLKTYAHLFDDKVMKQLKRRRYTGWGRLSRKLINGIRDKQSGKTILDFLKSDGFANRNFMQLIHDDSLTFKEDIQKAQVSGQGDSLHEHIANLAGSPAIKKGILQTVKVVDELVKVMGRHKPENIVIEMARENQTTQKGQKNSRERMKRIEEGIKELGSQILKEHPVENTQLQNEKLYLYYLQNGRDMYVDQELDINRLSDYDVDHIVPQSFLKDDSIDNKVLTRSDKARGKSDNVPSEEVVKKMKNYWRQLLNAKLITQRKFDNLTKAERGGLSELDKAGFIKRQLVETRQITKHVAQILDSRMNTKYDENDKLIREVKVITLKSKLVSDFRKDFQFYKVREINNYHHAHDAYLNAVVGTALIKKYPKLESEFVYGDYKVYDVRKMIAKSEQEIGKATAKYFFYSNIMNFFKTEITLANGEIRKRPLIETNGETGEIVWDKGRDFATVRKVLSMPQVNIVKKTEVQTGGFSKESILPKRNSDKLIARKKDWDPKKYGGFDSPTVAYSVLVVAKVEKGKSKKLKSVKELLGITIMERSSFEKNPIDFLEAKGYKEVKKDLIIKLPKYSLFELENGRKRMLASAGELQKGNELALPSKYVNFLYLASHYEKLKGSPEDNEQKQLFVEQHKHYLDEIIEQISEFSKRVILADANLDKVLSAYNKHRDKPIREQAENIIHLFTLTNLGAPAAFKYFDTTIDRKRYTSTKEVLDATLIHQSITGLYETRIDLSQLGGDGGGGGGGSEAAAKGGTLNLEDEYRLYETSAEPEVSPGSTWLSDFPQAWAETGGMGLAVRQAPLIIPLKATSTPVSIKQYPMSQEAKLGIKPHIQRLLDQGILVPCQSPWNTPLLPVKKPGTNDYRPVQDLREVNKRVEDIHPTVPNPYNLLSGLPPSHRWYTVLDLKDAFFCLRLHPTSQPLFAFEWRDPGMGISGQLTWTRLPQGFKNSPTLFNEALHRDLADFRIQHPDLILLQYVDDILLAATSELDCQQGTRALLLTLGNLGYRASAKKAQLCQKQVKYLGYLLKEGQRWLTEARKETVMGQPTPKTPRQLREFLGTAGFCRLWIPGFAEMAAPLYPLTKPGTLFNWGPDQQKAYQEIKQALLTAPALGLPDLTKPFELFVDEKQGYAKGVLTQKLGPWRRPVAYLSKKLDPVAAGWPPCLRMVAAIAVLRKDAGKLTMGQPLVILAPHAVEALVKQPPDRWLSNARMTHYQAMLLDTDRVQFGPVVALNPATLLPLPEEGAPHDCLEILAETHGTRPDLTDQPIPDADHTWYTDGSSFLQEGQRKAGAAVTTETEVIWARALPAGTSAQRAELIALTQALKMAEGKRLNVYTDSRYAFATAHIHGEIYRRRGWLTSEGREIKNKSEILALLKALFLPKRLSIIHCLGHQKGDSAEARGNRLADQAAREAAIKTPPDTSTLLAGKRTADGSEFEKRTADGSEFESPKKKAKVE

SEQ ID NO: 6918 - protein, 2096 aa, synthetic construct
MPAAKRVKLDGGDKKYSIGLDIGTNSVGWAVITDEYKVPSKKFKVLGNTDRHSIKKNLIGALLFDSGETAEATRLKRTARRRYTRRKNRICYLQEIFSNEMAKVDDSFFHRLEESFLVEEDKKHERHPIFGNIVDEVAYHEKYPTIYHLRKKLVDSTDKADLRLIYLALAHMIKFRGHFLIEGDLNPDNSDVDKLFIQLVQTYNQLFEENPINASGVDAKAILSARLSKSRRLENLIAQLPGEKKNGLFGNLIALSLGLTPNFKSNFDLAEDAKLQLSKDTYDDDLDNLLAQIGDQYADLFLAAKNLSDAILLSDILRVNTEITKAPLSASMIKRYDEHHQDLTLLKALVRQQLPEKYKEIFFDQSKNGYAGYIDGGASQEEFYKFIKPILEKMDGTEELLVKLNREDLLRKQRTFDNGSIPHQIHLGELHAILRRQEDFYPFLKDNREKIEKILTFRIPYYVGPLARGNSRFAWMTRKSEETITPWNFEEVVDKGASAQSFIERMTNFDKNLPNEKVLPKHSLLYEYFTVYNELTKVKYVTEGMRKPAFLSGEQKKAIVDLLFKTNRKVTVKQLKEDYFKKIECFDSVEISGVEDRFNASLGTYHDLLKIIKDKDFLDNEENEDILEDIVLTLTLFEDREMIEERLKTYAHLFDDKVMKQLKRRRYTGWGRLSRKLINGIRDKQSGKTILDFLKSDGFANRNFMQLIHDDSLTFKEDIQKAQVSGQGDSLHEHIANLAGSPAIKKGILQTVKVVDELVKVMGRHKPENIVIEMARENQTTQKGQKNSRERMKRIEEGIKELGSQILKEHPVENTQLQNEKLYLYYLQNGRDMYVDQELDINRLSDYDVDHIVPQSFLKDDSIDNKVLTRSDKARGKSDNVPSEEVVKKMKNYWRQLLNAKLITQRKFDNLTKAERGGLSELDKAGFIKRQLVETRQITKHVAQILDSRMNTKYDENDKLIREVKVITLKSKLVSDFRKDFQFYKVREINNYHHAHDAYLNAVVGTALIKKYPKLESEFVYGDYKVYDVRKMIAKSEQEIGKATAKYFFYSNIMNFFKTEITLANGEIRKRPLIETNGETGEIVWDKGRDFATVRKVLSMPQVNIVKKTEVQTGGFSKESILPKRNSDKLIARKKDWDPKKYGGFDSPTVAYSVLVVAKVEKGKSKKLKSVKELLGITIMERSSFEKNPIDFLEAKGYKEVKKDLIIKLPKYSLFELENGRKRMLASAGELQKGNELALPSKYVNFLYLASHYEKLKGSPEDNEQKQLFVEQHKHYLDEIIEQISEFSKRVILADANLDKVLSAYNKHRDKPIREQAENIIHLFTLTNLGAPAAFKYFDTTIDRKRYTSTKEVLDATLIHQSITGLYETRIDLSQLGGDGGGGGGGSEAAAKGGTLNIEDEYRLHETSKGPDVPLGSTWLSDFPQAWAETGGMGLAFRQAPLIISLKATSTPVSIKQYPMSQEARLGIKPHIQRLLDQGILVPCQSPWNTPLLPVKKPGTNDYRPVQDLREVNKRVEDIHPTVPNPYNLLSGLPPSHQWYTVLDLKDAFFCLRLHPTSQSLFAFEWKDPEMGISGQLTWTRLPQGFKNSPTLFDEALHRDLADFRIQHPDLILLQYVDDLLLAATSELDCQQGTRALLQTLGDLGYRASAKKAQICQKQVKYLGYLLKEGQRWLTEARKETVMGQPTPKTPRQLREFLGTAGLCRLWIPGFAEMAAPLYPLTKTGTLFKWGPDQQKAYQEIKQALLTAPALGLPDLTKPFELFVDEKQGYAKGVLTQKLGPWRRPVAYLSKKLDPVAAGWPPCLRMVAAIAVLTKDVGKLTMGQPLVILAPHAVEALVKQPPDRWLSNARMTHYQALLLDTDRVQFGPIVALNPATLLPLPEEGLQHDCLDILAEAHGTRPDLTDQPLPDADHTWYTDGSSFLQEGQRRAGAAVTTETEVIWAKALPAGTSAQRAELIALTQALKMAAGKKLNVYTDSRYAFATAHIHGEIYRRRGLLTSEGKEIKNKDEILALLKALFLPKRLSIIHCPGHQKGNHAEARGNRMADQAAREVATRETPETSTLLAGKRTADGSEFEKRTADGSEFESPKKKAKVE

SEQ ID NO: 6919 - protein, 2096 aa, synthetic construct
MPAAKRVKLDGGDKKYSIGLDIGTNSVGWAVITDEYKVPSKKFKVLGNTDRHSIKKNLIGALLFDSGETAEATRLKRTARRRYTRRKNRICYLQEIFSNEMAKVDDSFFHRLEESFLVEEDKKHERHPIFGNIVDEVAYHEKYPTIYHLRKKLVDSTDKADLRLIYLALAHMIKFRGHFLIEGDLNPDNSDVDKLFIQLVQTYNQLFEENPINASGVDAKAILSARLSKSRRLENLIAQLPGEKKNGLFGNLIALSLGLTPNFKSNFDLAEDAKLQLSKDTYDDDLDNLLAQIGDQYADLFLAAKNLSDAILLSDILRVNTEITKAPLSASMIKRYDEHHQDLTLLKALVRQQLPEKYKEIFFDQSKNGYAGYIDGGASQEEFYKFIKPILEKMDGTEELLVKLNREDLLRKQRTFDNGSIPHQIHLGELHAILRRQEDFYPFLKDNREKIEKILTFRIPYYVGPLARGNSRFAWMTRKSEETITPWNFEEVVDKGASAQSFIERMTNFDKNLPNEKVLPKHSLLYEYFTVYNELTKVKYVTEGMRKPAFLSGEQKKAIVDLLFKTNRKVTVKQLKEDYFKKIECFDSVEISGVEDRFNASLGTYHDLLKIIKDKDFLDNEENEDILEDIVLTLTLFEDREMIEERLKTYAHLFDDKVMKQLKRRRYTGWGRLSRKLINGIRDKQSGKTILDFLKSDGFANRNFMQLIHDDSLTFKEDIQKAQVSGQGDSLHEHIANLAGSPAIKKGILQTVKVVDELVKVMGRHKPENIVIEMARENQTTQKGQKNSRERMKRIEEGIKELGSQILKEHPVENTQLQNEKLYLYYLQNGRDMYVDQELDINRLSDYDVDHIVPQSFLKDDSIDNKVLTRSDKARGKSDNVPSEEVVKKMKNYWRQLLNAKLITQRKFDNLTKAERGGLSELDKAGFIKRQLVETRQITKHVAQILDSRMNTKYDENDKLIREVKVITLKSKLVSDFRKDFQFYKVREINNYHHAHDAYLNAVVGTALIKKYPKLESEFVYGDYKVYDVRKMIAKSEQEIGKATAKYFFYSNIMNFFKTEITLANGEIRKRPLIETNGETGEIVWDKGRDFATVRKVLSMPQVNIVKKTEVQTGGFSKESILPKRNSDKLIARKKDWDPKKYGGFDSPTVAYSVLVVAKVEKGKSKKLKSVKELLGITIMERSSFEKNPIDFLEAKGYKEVKKDLIIKLPKYSLFELENGRKRMLASAGELQKGNELALPSKYVNFLYLASHYEKLKGSPEDNEQKQLFVEQHKHYLDEIIEQISEFSKRVILADANLDKVLSAYNKHRDKPIREQAENIIHLFTLTNLGAPAAFKYFDTTIDRKRYTSTKEVLDATLIHQSITGLYETRIDLSQLGGDGGGGGGGSEAAAKGGTLNIEDEYRLHETSKGPDVPLGSTWLSDFPQAWAETGGMGLAVRQAPLIIPLKATSTPVSIKQYPMSQEARLGIKPHIQRLLDQGILVPCQSPWNTPLLPVKKPGTNDYRPVQDLREVNKRVEDIHPTVPNPYNLLSGLPPSHQWYTVLDLKDAFFCLRLHPTSQSLFAFEWRDPEMGISGQLTWTRLPQGFKNSPTLFNEALHRDLADFRIQHPDLILLQYVDDLLLAATSELDCQQGTRALLQTLGDLGYRASAKKAQICQKQVKYLGYLLKEGQRWLTEARKETVMGQPTPKTPRQLREFLGTAGFCRLWIPGFAEMAAPLYPLTKPGTLFEWGPDQQKAYQEIKQALLTAPALGLPDLTKPFELFVDEKQGYAKGVLTQKLGPWRRPVAYLSKKLDPVAAGWPPCLRMVAAIAVLTKDAGKLTMGQPLVILAPHAVEALVKQPPDRWLSNARMTHYQALLLDTDRVQFGPIVALNPATLLPLPEEGLQHDCLDILAEAHGTRPDLTDQPLPDADHTWYTDGSSFLQEGQRKAGAAVTTETEVVWAKALPAGTSAQRAELIALTQALKMAEGKKLNVYTDSRYAFATAHIHGEIYRRRGWLTSEGKEIKNKDEILALLKALFLPKRLSIIHCPGHQKGNRAEARGNRMADQAAREVATRETPETSTLLAGKRTADGSEFEKRTADGSEFESPKKKAKVE

SEQ ID NO: 6920 - protein, 2090 aa, synthetic construct
MPAAKRVKLDGGDKKYSIGLDIGTNSVGWAVITDEYKVPSKKFKVLGNTDRHSIKKNLIGALLFDSGETAEATRLKRTARRRYTRRKNRICYLQEIFSNEMAKVDDSFFHRLEESFLVEEDKKHERHPIFGNIVDEVAYHEKYPTIYHLRKKLVDSTDKADLRLIYLALAHMIKFRGHFLIEGDLNPDNSDVDKLFIQLVQTYNQLFEENPINASGVDAKAILSARLSKSRRLENLIAQLPGEKKNGLFGNLIALSLGLTPNFKSNFDLAEDAKLQLSKDTYDDDLDNLLAQIGDQYADLFLAAKNLSDAILLSDILRVNTEITKAPLSASMIKRYDEHHQDLTLLKALVRQQLPEKYKEIFFDQSKNGYAGYIDGGASQEEFYKFIKPILEKMDGTEELLVKLNREDLLRKQRTFDNGSIPHQIHLGELHAILRRQEDFYPFLKDNREKIEKILTFRIPYYVGPLARGNSRFAWMTRKSEETITPWNFEEVVDKGASAQSFIERMTNFDKNLPNEKVLPKHSLLYEYFTVYNELTKVKYVTEGMRKPAFLSGEQKKAIVDLLFKTNRKVTVKQLKEDYFKKIECFDSVEISGVEDRFNASLGTYHDLLKIIKDKDFLDNEENEDILEDIVLTLTLFEDREMIEERLKTYAHLFDDKVMKQLKRRRYTGWGRLSRKLINGIRDKQSGKTILDFLKSDGFANRNFMQLIHDDSLTFKEDIQKAQVSGQGDSLHEHIANLAGSPAIKKGILQTVKVVDELVKVMGRHKPENIVIEMARENQTTQKGQKNSRERMKRIEEGIKELGSQILKEHPVENTQLQNEKLYLYYLQNGRDMYVDQELDINRLSDYDVDHIVPQSFLKDDSIDNKVLTRSDKARGKSDNVPSEEVVKKMKNYWRQLLNAKLITQRKFDNLTKAERGGLSELDKAGFIKRQLVETRQITKHVAQILDSRMNTKYDENDKLIREVKVITLKSKLVSDFRKDFQFYKVREINNYHHAHDAYLNAVVGTALIKKYPKLESEFVYGDYKVYDVRKMIAKSEQEIGKATAKYFFYSNIMNFFKTEITLANGEIRKRPLIETNGETGEIVWDKGRDFATVRKVLSMPQVNIVKKTEVQTGGFSKESILPKRNSDKLIARKKDWDPKKYGGFDSPTVAYSVLVVAKVEKGKSKKLKSVKELLGITIMERSSFEKNPIDFLEAKGYKEVKKDLIIKLPKYSLFELENGRKRMLASAGELQKGNELALPSKYVNFLYLASHYEKLKGSPEDNEQKQLFVEQHKHYLDEIIEQISEFSKRVILADANLDKVLSAYNKHRDKPIREQAENIIHLFTLTNLGAPAAFKYFDTTIDRKRYTSTKEVLDATLIHQSITGLYETRIDLSQLGGDGGGGGGGSEAAAKGGTLQLDDEYRLYSPLVKPDQNIQFWLEQFPQAWAETAGMGLAKQVPPQVIQLKASATPVSVRQYPLSKEAQEGIRPHVQRLIQQGILVPVQSPWNTPLLPVRKPGTNDYRPVQDLREVNKRVQDIHPTVPNPYNLLCALPPQRSWYTVLDLKDAFFCLRLHPTSQPLFAFEWRDPGTGRTGQLTWTRLPQGFKNSPTIFDEALHRDLANFRIQHPQVTLLQYVDDLLLAGATKQDCLEGTKALLLELSDLGYRASAKKAQICRREVTYLGYSLRDGQRWLTEARKKTVVQIPAPTTAKQVREFLGTAGFCRLWIPGFATLAAPLYPLTKEKGEFSWAPEHQKAFDAIKKALLSAPALALPDVTKPFTLYVDERKGVARGVLTQTLGPWRRPVAYLSKKLDPVASGWPVCLKAIAAVAILVKDADKLTLGQNITVIAPHALENIVRQPPDRWMTNARMTHYQSLLLTERVTFAPPAALNPATLLPEETDEPVTHDCHQLLIEETGVRKDLTDIPLTGEVLTWFTDGSSYVVEGKRMAGAAVVDGTRTIWASSLPEGTSAQKAELMALTQALRLAEGKSINIYTDSRYAFATAHVHGAIYKQRGLLTSAGREIKNKEEILSLLEALHLPKRLAIIHCPGHQKAKDPISRGNQMADRVAKQAAQGVNLLAGKRTADGSEFEKRTADGSEFESPKKKAKVE

SEQ ID NO: 6921 - protein, 2087 aa, synthetic construct
MPAAKRVKLDGGDKKYSIGLDIGTNSVGWAVITDEYKVPSKKFKVLGNTDRHSIKKNLIGALLFDSGETAEATRLKRTARRRYTRRKNRICYLQEIFSNEMAKVDDSFFHRLEESFLVEEDKKHERHPIFGNIVDEVAYHEKYPTIYHLRKKLVDSTDKADLRLIYLALAHMIKFRGHFLIEGDLNPDNSDVDKLFIQLVQTYNQLFEENPINASGVDAKAILSARLSKSRRLENLIAQLPGEKKNGLFGNLIALSLGLTPNFKSNFDLAEDAKLQLSKDTYDDDLDNLLAQIGDQYADLFLAAKNLSDAILLSDILRVNTEITKAPLSASMIKRYDEHHQDLTLLKALVRQQLPEKYKEIFFDQSKNGYAGYIDGGASQEEFYKFIKPILEKMDGTEELLVKLNREDLLRKQRTFDNGSIPHQIHLGELHAILRRQEDFYPFLKDNREKIEKILTFRIPYYVGPLARGNSRFAWMTRKSEETITPWNFEEVVDKGASAQSFIERMTNFDKNLPNEKVLPKHSLLYEYFTVYNELTKVKYVTEGMRKPAFLSGEQKKAIVDLLFKTNRKVTVKQLKEDYFKKIECFDSVEISGVEDRFNASLGTYHDLLKIIKDKDFLDNEENEDILEDIVLTLTLFEDREMIEERLKTYAHLFDDKVMKQLKRRRYTGWGRLSRKLINGIRDKQSGKTILDFLKSDGFANRNFMQLIHDDSLTFKEDIQKAQVSGQGDSLHEHIANLAGSPAIKKGILQTVKVVDELVKVMGRHKPENIVIEMARENQTTQKGQKNSRERMKRIEEGIKELGSQILKEHPVENTQLQNEKLYLYYLQNGRDMYVDQELDINRLSDYDVDHIVPQSFLKDDSIDNKVLTRSDKARGKSDNVPSEEVVKKMKNYWRQLLNAKLITQRKFDNLTKAERGGLSELDKAGFIKRQLVETRQITKHVAQILDSRMNTKYDENDKLIREVKVITLKSKLVSDFRKDFQFYKVREINNYHHAHDAYLNAVVGTALIKKYPKLESEFVYGDYKVYDVRKMIAKSEQEIGKATAKYFFYSNIMNFFKTEITLANGEIRKRPLIETNGETGEIVWDKGRDFATVRKVLSMPQVNIVKKTEVQTGGFSKESILPKRNSDKLIARKKDWDPKKYGGFDSPTVAYSVLVVAKVEKGKSKKLKSVKELLGITIMERSSFEKNPIDFLEAKGYKEVKKDLIIKLPKYSLFELENGRKRMLASAGELQKGNELALPSKYVNFLYLASHYEKLKGSPEDNEQKQLFVEQHKHYLDEIIEQISEFSKRVILADANLDKVLSAYNKHRDKPIREQAENIIHLFTLTNLGAPAAFKYFDTTIDRKRYTSTKEVLDATLIHQSITGLYETRIDLSQLGGDGGGGGGGSEAAAKGGVPWLMKKPLQLTVLVPLHEYQERLLQQTALPKEQKELLQKLFLKYDALWQHWENQVGHRRIKPHNIATGTLAPRPQKQYPINPKAKPSIQIVIDDLLKQGVLIQQNSTMNTPVYPVPKPDGKWRMVLDYREVNKTIPLIAAQNQHSAGILSSIYRGKYKTTLDLTNGFWAHPITPESYWLTAFTWQGKQYCWTRLPQGFLNSPALFTADVVDLLKEIPNVQAYVDDIYISHDDPQEHLEQLEKIFSILLNAGYVVSLKKSEIAQREVEFLGFNITKEGRGLTDTFKQKLLNITPPKDLKQLQSILGLLNFARNFIPNYSELVKPLYTIVANANGKFISWTEDNSNQLQHIISVLNQADNLEERNPETRLIIKVNSSPSAGYIRYYNEGSKRPIMYVNYIFSKAEAKFTQTEKLLTTMHKGLIKAMDLAMGQEILVYSPIVSMTKIQRTPLPERKALPVRWITWMTYLEDPRIQFHYDKSLPELQQIPNVTEDVIAKTKHPSEFAMVFYTDGSAIKHPDVNKSHSAGMGIAQVQFIPEYKIVHQWSIPLGDHTAQLAEIAAVEFACKKALKISGPVLIVTDSFYVAESANKELPYWKSNGFLNNKKKPLRHVSKWKSIAECLQLKPDIIIMHEKGHQQPMTTLHTEGNNLADKLATQGSYVVHAGKRTADGSEFEKRTADGSEFESPKKKAKVE

SEQ ID NO: 6922 - protein, 2087 aa, synthetic construct
MPAAKRVKLDGGDKKYSIGLDIGTNSVGWAVITDEYKVPSKKFKVLGNTDRHSIKKNLIGALLFDSGETAEATRLKRTARRRYTRRKNRICYLQEIFSNEMAKVDDSFFHRLEESFLVEEDKKHERHPIFGNIVDEVAYHEKYPTIYHLRKKLVDSTDKADLRLIYLALAHMIKFRGHFLIEGDLNPDNSDVDKLFIQLVQTYNQLFEENPINASGVDAKAILSARLSKSRRLENLIAQLPGEKKNGLFGNLIALSLGLTPNFKSNFDLAEDAKLQLSKDTYDDDLDNLLAQIGDQYADLFLAAKNLSDAILLSDILRVNTEITKAPLSASMIKRYDEHHQDLTLLKALVRQQLPEKYKEIFFDQSKNGYAGYIDGGASQEEFYKFIKPILEKMDGTEELLVKLNREDLLRKQRTFDNGSIPHQIHLGELHAILRRQEDFYPFLKDNREKIEKILTFRIPYYVGPLARGNSRFAWMTRKSEETITPWNFEEVVDKGASAQSFIERMTNFDKNLPNEKVLPKHSLLYEYFTVYNELTKVKYVTEGMRKPAFLSGEQKKAIVDLLFKTNRKVTVKQLKEDYFKKIECFDSVEISGVEDRFNASLGTYHDLLKIIKDKDFLDNEENEDILEDIVLTLTLFEDREMIEERLKTYAHLFDDKVMKQLKRRRYTGWGRLSRKLINGIRDKQSGKTILDFLKSDGFANRNFMQLIHDDSLTFKEDIQKAQVSGQGDSLHEHIANLAGSPAIKKGILQTVKVVDELVKVMGRHKPENIVIEMARENQTTQKGQKNSRERMKRIEEGIKELGSQILKEHPVENTQLQNEKLYLYYLQNGRDMYVDQELDINRLSDYDVDHIVPQSFLKDDSIDNKVLTRSDKARGKSDNVPSEEVVKKMKNYWRQLLNAKLITQRKFDNLTKAERGGLSELDKAGFIKRQLVETRQITKHVAQILDSRMNTKYDENDKLIREVKVITLKSKLVSDFRKDFQFYKVREINNYHHAHDAYLNAVVGTALIKKYPKLESEFVYGDYKVYDVRKMIAKSEQEIGKATAKYFFYSNIMNFFKTEITLANGEIRKRPLIETNGETGEIVWDKGRDFATVRKVLSMPQVNIVKKTEVQTGGFSKESILPKRNSDKLIARKKDWDPKKYGGFDSPTVAYSVLVVAKVEKGKSKKLKSVKELLGITIMERSSFEKNPIDFLEAKGYKEVKKDLIIKLPKYSLFELENGRKRMLASAGELQKGNELALPSKYVNFLYLASHYEKLKGSPEDNEQKQLFVEQHKHYLDEIIEQISEFSKRVILADANLDKVLSAYNKHRDKPIREQAENIIHLFTLTNLGAPAAFKYFDTTIDRKRYTSTKEVLDATLIHQSITGLYETRIDLSQLGGDGGGGGGGSEAAAKGGVPWLMKKPLQLTVLVPLHEYQERLLQQTALPKEQKELLQKLFLKYDALWQHWENQVGHRRIKPHNIATGTLAPRPQKQYPINPKAKPSIQIVIDDLLKQGVLIQQNSTMNTPVYPVPKPDGKWRMVLDYREVNKTIPLIAAQNQHSAGILSSIYRGKYKTTLDLTNGFWAHPITPESYWLTAFTWQGKQYCWTRLPQGFLNSPALFNADVVDLLKEIPNVQAYVDDIYISHDDPQEHLEQLEKIFSILLNAGYVVSLKKSEIAQREVEFLGFNITKEGRGLTDTFKQKLLNITPPKDLKQLQSILGLLNFARNFIPNYSELVKPLYTIVAPANGKFISWTEDNSNQLQHIISVLNQADNLEERNPETRLIIKVNSSPSAGYIRYYNEGSKRPIMYVNYIFSKAEAKFTQTEKLLTTMHKGLIKAMDLAMGQEILVYSPIVSMTKIQRTPLPERKALPVRWITWMTYLEDPRIQFHYDKSLPELQQIPNVTEDVIAKTKHPSEFAMVFYTDGSAIKHPDVNKSHSAGMGIAQVQFIPEYKIVHQWSIPLGDHTAQLAEIAAVEFACKKALKISGPVLIVTDSFYVAESANKELPYWKSNGFLNNKKKPLRHVSKWKSIAECLQLKPDIIIMHEKGHQQPMTTLHTEGNNLADKLATQGSYVVHAGKRTADGSEFEKRTADGSEFESPKKKAKVE

SEQ ID NO: 6923 - protein, 2087 aa, synthetic construct
MPAAKRVKLDGGDKKYSIGLDIGTNSVGWAVITDEYKVPSKKFKVLGNTDRHSIKKNLIGALLFDSGETAEATRLKRTARRRYTRRKNRICYLQEIFSNEMAKVDDSFFHRLEESFLVEEDKKHERHPIFGNIVDEVAYHEKYPTIYHLRKKLVDSTDKADLRLIYLALAHMIKFRGHFLIEGDLNPDNSDVDKLFIQLVQTYNQLFEENPINASGVDAKAILSARLSKSRRLENLIAQLPGEKKNGLFGNLIALSLGLTPNFKSNFDLAEDAKLQLSKDTYDDDLDNLLAQIGDQYADLFLAAKNLSDAILLSDILRVNTEITKAPLSASMIKRYDEHHQDLTLLKALVRQQLPEKYKEIFFDQSKNGYAGYIDGGASQEEFYKFIKPILEKMDGTEELLVKLNREDLLRKQRTFDNGSIPHQIHLGELHAILRRQEDFYPFLKDNREKIEKILTFRIPYYVGPLARGNSRFAWMTRKSEETITPWNFEEVVDKGASAQSFIERMTNFDKNLPNEKVLPKHSLLYEYFTVYNELTKVKYVTEGMRKPAFLSGEQKKAIVDLLFKTNRKVTVKQLKEDYFKKIECFDSVEISGVEDRFNASLGTYHDLLKIIKDKDFLDNEENEDILEDIVLTLTLFEDREMIEERLKTYAHLFDDKVMKQLKRRRYTGWGRLSRKLINGIRDKQSGKTILDFLKSDGFANRNFMQLIHDDSLTFKEDIQKAQVSGQGDSLHEHIANLAGSPAIKKGILQTVKVVDELVKVMGRHKPENIVIEMARENQTTQKGQKNSRERMKRIEEGIKELGSQILKEHPVENTQLQNEKLYLYYLQNGRDMYVDQELDINRLSDYDVDHIVPQSFLKDDSIDNKVLTRSDKARGKSDNVPSEEVVKKMKNYWRQLLNAKLITQRKFDNLTKAERGGLSELDKAGFIKRQLVETRQITKHVAQILDSRMNTKYDENDKLIREVKVITLKSKLVSDFRKDFQFYKVREINNYHHAHDAYLNAVVGTALIKKYPKLESEFVYGDYKVYDVRKMIAKSEQEIGKATAKYFFYSNIMNFFKTEITLANGEIRKRPLIETNGETGEIVWDKGRDFATVRKVLSMPQVNIVKKTEVQTGGFSKESILPKRNSDKLIARKKDWDPKKYGGFDSPTVAYSVLVVAKVEKGKSKKLKSVKELLGITIMERSSFEKNPIDFLEAKGYKEVKKDLIIKLPKYSLFELENGRKRMLASAGELQKGNELALPSKYVNFLYLASHYEKLKGSPEDNEQKQLFVEQHKHYLDEIIEQISEFSKRVILADANLDKVLSAYNKHRDKPIREQAENIIHLFTLTNLGAPAAFKYFDTTIDRKRYTSTKEVLDATLIHQSITGLYETRIDLSQLGGDGGGGGGGSEAAAKGGIPWLMKKPLQLTTLVPLQEYEERLLKQTMLTGSYKEKLQSLFLKYDALWQHWENQVGHRRIKPHHIATGTVNPRPQKQYPINPKAKASIQTVINDLLKQGVLIQQNSIMNTPVYPVPKPDGKWRMVLDYREVNKTIPLIAAQNQHSAGILSSIFRGKYKTTLDLSNGFWAHSITPESYWLTAFTWLGQQYCWTRLPQGFLNSPALFNADVVDLLKEVPNVQVYVDDIYISHDDPREHLEQLEKVFSLLLNAGYVVSLKKSEIAQHEVEFLGFNITKEGRGLTETFKQKLLNITPPRDLKQLQSILGKLNFARNFIPNFSELVKPLYNIIATAPGKYITWTTDNSQQLQNIISMLNSAENLEERNPEVRLIMKVNTSPSAGYIRFYNEFAKRPIMYLNYVYTKAEVKFTNTEKLLTTIHKGLIKALDLGMGQEILVYSPIVSMTKIQKTPLPERKALPIRWITWMSYLEDPRIQFHYDKTLPELQQVPTVTDDIIAKIKHPSEFSMVFYTDGSAIKHPNVNKSHNAGMGIAQVQFKPEFTVINTWSIPLGDHTAQLAEVAAVEFACKKALKIDGPVLIVTDSFYVAESVNKELPYWQSNGFFNNKKKPLKHVSKWKSIADCIQLKPDIIIIHEKGHQPTASTFHTEGNNLADKLATQGSYVVNAGKRTADGSEFEKRTADGSEFESPKKKAKVE

SEQ ID NO: 6924 - protein, 2094 aa, synthetic construct
MPAAKRVKLDGGDKKYSIGLDIGTNSVGWAVITDEYKVPSKKFKVLGNTDRHSIKKNLIGALLFDSGETAEATRLKRTARRRYTRRKNRICYLQEIFSNEMAKVDDSFFHRLEESFLVEEDKKHERHPIFGNIVDEVAYHEKYPTIYHLRKKLVDSTDKADLRLIYLALAHMIKFRGHFLIEGDLNPDNSDVDKLFIQLVQTYNQLFEENPINASGVDAKAILSARLSKSRRLENLIAQLPGEKKNGLFGNLIALSLGLTPNFKSNFDLAEDAKLQLSKDTYDDDLDNLLAQIGDQYADLFLAAKNLSDAILLSDILRVNTEITKAPLSASMIKRYDEHHQDLTLLKALVRQQLPEKYKEIFFDQSKNGYAGYIDGGASQEEFYKFIKPILEKMDGTEELLVKLNREDLLRKQRTFDNGSIPHQIHLGELHAILRRQEDFYPFLKDNREKIEKILTFRIPYYVGPLARGNSRFAWMTRKSEETITPWNFEEVVDKGASAQSFIERMTNFDKNLPNEKVLPKHSLLYEYFTVYNELTKVKYVTEGMRKPAFLSGEQKKAIVDLLFKTNRKVTVKQLKEDYFKKIECFDSVEISGVEDRFNASLGTYHDLLKIIKDKDFLDNEENEDILEDIVLTLTLFEDREMIEERLKTYAHLFDDKVMKQLKRRRYTGWGRLSRKLINGIRDKQSGKTILDFLKSDGFANRNFMQLIHDDSLTFKEDIQKAQVSGQGDSLHEHIANLAGSPAIKKGILQTVKVVDELVKVMGRHKPENIVIEMARENQTTQKGQKNSRERMKRIEEGIKELGSQILKEHPVENTQLQNEKLYLYYLQNGRDMYVDQELDINRLSDYDVDHIVPQSFLKDDSIDNKVLTRSDKARGKSDNVPSEEVVKKMKNYWRQLLNAKLITQRKFDNLTKAERGGLSELDKAGFIKRQLVETRQITKHVAQILDSRMNTKYDENDKLIREVKVITLKSKLVSDFRKDFQFYKVREINNYHHAHDAYLNAVVGTALIKKYPKLESEFVYGDYKVYDVRKMIAKSEQEIGKATAKYFFYSNIMNFFKTEITLANGEIRKRPLIETNGETGEIVWDKGRDFATVRKVLSMPQVNIVKKTEVQTGGFSKESILPKRNSDKLIARKKDWDPKKYGGFDSPTVAYSVLVVAKVEKGKSKKLKSVKELLGITIMERSSFEKNPIDFLEAKGYKEVKKDLIIKLPKYSLFELENGRKRMLASAGELQKGNELALPSKYVNFLYLASHYEKLKGSPEDNEQKQLFVEQHKHYLDEIIEQISEFSKRVILADANLDKVLSAYNKHRDKPIREQAENIIHLFTLTNLGAPAAFKYFDTTIDRKRYTSTKEVLDATLIHQSITGLYETRIDLSQLGGDGGGGGGGSEAAAKGGVLNLEEEYRLHEKPVPSSIDPSWLQLFPTVWAERAGMGLANQVPPVVVELRSGASPVAVRQYPMSKEAREGIRPHIQRFLDLGVLVPCQSPWNTPLLPVKKPGTNDYRPVQDLREINKRVQDIHPTVPNPYNLLSSLPPSHTWYSVLDLKDAFFCLKLHPNSQPLFAFEWRDPEKGNTGQLTWTRLPQGFKNSPTLFNEALHRDLAPFRALNPQVVLLQYVDDLLVAAPTYRDCKEGTQKLLQELSKLGYRVSAKKAQLCQKEVTYLGYLLKEGKRWLTPARKATVMKIPPPTTPRQVREFLGKAGFCRLFIPGFASLAAPLYPLTKPSIPFIWTEEHQKAFDRIKEALLSAPALALPDLTKPFTLYVDERAGVARGVLTQTLGPWRRPVAYLSKKLDPVASGWPTCLKAVAAVALLLKDADKLTLGQNVTVIASHSLESIVRQPPDRWMTNARMTHYQSLLLNERVSFAPPAVLNPATLLPVESEATPVHRCSEILAEETGTRRDLKDQPLPGVPAWYTDGSSFIAEGKRRAGAAIVDGKRTVWASSLPEGTSAQKAELVALTQALRLAEGKDINIYTDSRYAFATAHIHGAIYKQRGWLTSAGKDIKNKEEILALLEAIHLPKRVAIIHCPGHQKGNDPVATGNRRADEAAKQAALSTRVLAETTKPAGKRTADGSEFEKRTADGSEFESPKKKAKVE

SEQ ID NO: 6925 - protein, 2096 aa, synthetic construct; identical to SEQ ID NO: 4519

SEQ ID NO: 6926 - protein, 2095 aa, synthetic construct
MPAAKRVKLDGGDKKYSIGLDIGTNSVGWAVITDEYKVPSKKFKVLGNTDRHSIKKNLIGALLFDSGETAEATRLKRTARRRYTRRKNRICYLQEIFSNEMAKVDDSFFHRLEESFLVEEDKKHERHPIFGNIVDEVAYHEKYPTIYHLRKKLVDSTDKADLRLIYLALAHMIKFRGHFLIEGDLNPDNSDVDKLFIQLVQTYNQLFEENPINASGVDAKAILSARLSKSRRLENLIAQLPGEKKNGLFGNLIALSLGLTPNFKSNFDLAEDAKLQLSKDTYDDDLDNLLAQIGDQYADLFLAAKNLSDAILLSDILRVNTEITKAPLSASMIKRYDEHHQDLTLLKALVRQQLPEKYKEIFFDQSKNGYAGYIDGGASQEEFYKFIKPILEKMDGTEELLVKLNREDLLRKQRTFDNGSIPHQIHLGELHAILRRQEDFYPFLKDNREKIEKILTFRIPYYVGPLARGNSRFAWMTRKSEETITPWNFEEVVDKGASAQSFIERMTNFDKNLPNEKVLPKHSLLYEYFTVYNELTKVKYVTEGMRKPAFLSGEQKKAIVDLLFKTNRKVTVKQLKEDYFKKIECFDSVEISGVEDRFNASLGTYHDLLKIIKDKDFLDNEENEDILEDIVLTLTLFEDREMIEERLKTYAHLFDDKVMKQLKRRRYTGWGRLSRKLINGIRDKQSGKTILDFLKSDGFANRNFMQLIHDDSLTFKEDIQKAQVSGQGDSLHEHIANLAGSPAIKKGILQTVKVVDELVKVMGRHKPENIVIEMARENQTTQKGQKNSRERMKRIEEGIKELGSQILKEHPVENTQLQNEKLYLYYLQNGRDMYVDQELDINRLSDYDVDHIVPQSFLKDDSIDNKVLTRSDKARGKSDNVPSEEVVKKMKNYWRQLLNAKLITQRKFDNLTKAERGGLSELDKAGFIKRQLVETRQITKHVAQILDSRMNTKYDENDKLIREVKVITLKSKLVSDFRKDFQFYKVREINNYHHAHDAYLNAVVGTALIKKYPKLESEFVYGDYKVYDVRKMIAKSEQEIGKATAKYFFYSNIMNFFKTEITLANGEIRKRPLIETNGETGEIVWDKGRDFATVRKVLSMPQVNIVKKTEVQTGGFSKESILPKRNSDKLIARKKDWDPKKYGGFDSPTVAYSVLVVAKVEKGKSKKLKSVKELLGITIMERSSFEKNPIDFLEAKGYKEVKKDLIIKLPKYSLFELENGRKRMLASAGELQKGNELALPSKYVNFLYLASHYEKLKGSPEDNEQKQLFVEQHKHYLDEIIEQISEFSKRVILADANLDKVLSAYNKHRDKPIREQAENIIHLFTLTNLGAPAAFKYFDTTIDRKRYTSTKEVLDATLIHQSITGLYETRIDLSQLGGDGGGGGEAAAKGGSGGTLQLEEEYRLFEPESTQKQEMDIWLKNFPQAWAETGGMGTAHCQAPVLIQLKATATPISIRQYPMPHEAYQGIKPHIRRMLDQGILKPCQSPWNTPLLPVKKPGTEDYRPVQDLREVNKRVEDIHPTVPNPYNLLSTLPPSHPWYTVLDLKDAFFCLRLHSESQLLFAFEWRDPEIGLSGQLTWTRLPQGFKNSPTLFNEALHSDLADFRVRYPALVLLQYVDDLLLAAATRTECLEGTKALLETLGNKGYRASAKKAQICLQEVTYLGYSLKDGQRWLTKARKEAILSIPVPKNSRQVREFLGTAGYCRLWIPGFAELAAPLYPLTRPGTLFQWGTEQQLAFEDIKKALLSSPALGLPDITKPFELFIDENSGFAKGVLVQKLGPWKRPVAYLSKKLDTVASGWPPCLRMVAAIAILVKDAGKLTLGQPLTILTSHPVEALVRQPPNKWLSNARMTHYQAMLLDAERVHFGPTVSLNPATLLPLPSGGNHHDCLQILAETHGTRPDLTDQPLPDADLTWYTDGSSFIRNGEREAGAAVTTESEVIWAAPLPPGTSAQRAELIALTQALKMAEGKKLTVYTDSRYAFATTHVHGEIYRRRGWLTSEGKEIKNKNEILALLEALFLPKRLSIIHCPGHQKGDSPQAKGNRLADDTAKKAATETHSSLTVLPAGKRTADGSEFEKRTADGSEFESPKKKAKVE

SEQ ID NO: 6927 - protein, 2094 aa, synthetic construct
MPAAKRVKLDGGDKKYSIGLDIGTNSVGWAVITDEYKVPSKKFKVLGNTDRHSIKKNLIGALLFDSGETAEATRLKRTARRRYTRRKNRICYLQEIFSNEMAKVDDSFFHRLEESFLVEEDKKHERHPIFGNIVDEVAYHEKYPTIYHLRKKLVDSTDKADLRLIYLALAHMIKFRGHFLIEGDLNPDNSDVDKLFIQLVQTYNQLFEENPINASGVDAKAILSARLSKSRRLENLIAQLPGEKKNGLFGNLIALSLGLTPNFKSNFDLAEDAKLQLSKDTYDDDLDNLLAQIGDQYADLFLAAKNLSDAILLSDILRVNTEITKAPLSASMIKRYDEHHQDLTLLKALVRQQLPEKYKEIFFDQSKNGYAGYIDGGASQEEFYKFIKPILEKMDGTEELLVKLNREDLLRKQRTFDNGSIPHQIHLGELHAILRRQEDFYPFLKDNREKIEKILTFRIPYYVGPLARGNSRFAWMTRKSEETITPWNFEEVVDKGASAQSFIERMTNFDKNLPNEKVLPKHSLLYEYFTVYNELTKVKYVTEGMRKPAFLSGEQKKAIVDLLFKTNRKVTVKQLKEDYFKKIECFDSVEISGVEDRFNASLGTYHDLLKIIKDKDFLDNEENEDILEDIVLTLTLFEDREMIEERLKTYAHLFDDKVMKQLKRRRYTGWGRLSRKLINGIRDKQSGKTILDFLKSDGFANRNFMQLIHDDSLTFKEDIQKAQVSGQGDSLHEHIANLAGSPAIKKGILQTVKVVDELVKVMGRHKPENIVIEMARENQTTQKGQKNSRERMKRIEEGIKELGSQILKEHPVENTQLQNEKLYLYYLQNGRDMYVDQELDINRLSDYDVDHIVPQSFLKDDSIDNKVLTRSDKARGKSDNVPSEEVVKKMKNYWRQLLNAKLITQRKFDNLTKAERGGLSELDKAGFIKRQLVETRQITKHVAQILDSRMNTKYDENDKLIREVKVITLKSKLVSDFRKDFQFYKVREINNYHHAHDAYLNAVVGTALIKKYPKLESEFVYGDYKVYDVRKMIAKSEQEIGKATAKYFFYSNIMNFFKTEITLANGEIRKRPLIETNGETGEIVWDKGRDFATVRKVLSMPQVNIVKKTEVQTGGFSKESILPKRNSDKLIARKKDWDPKKYGGFDSPTVAYSVLVVAKVEKGKSKKLKSVKELLGITIMERSSFEKNPIDFLEAKGYKEVKKDLIIKLPKYSLFELENGRKRMLASAGELQKGNELALPSKYVNFLYLASHYEKLKGSPEDNEQKQLFVEQHKHYLDEIIEQISEFSKRVILADANLDKVLSAYNKHRDKPIREQAENIIHLFTLTNLGAPAAFKYFDTTIDRKRYTSTKEVLDATLIHQSITGLYETRIDLSQLGGDGGGGGEAAAKGGSGGVLNLEEEYRLHEKPVPSSIDPSWLQLFPTVWAERAGMGLANQVPPVVVELRSGASPVAVRQYPMSKEAREGIRPHIQKFLDLGVLVPCRSPWNTPLLPVKKPGTNDYRPVQDLREINKRVQDIHPTVPNPYNLLSSLPPSYTWYSVLDLKDAFFCLRLHPNSQPLFAFEWKDPEKGNTGQLTWTRLPQGFKNSPTLFNEALHRDLAPFRALNPQVVLLQYVDDLLVAAPTYEDCKKGTQKLLQELSKLGYRVSAKKAQLCQREVTYLGYLLKEGKRWLTPARKATVMKIPVPTTPRQVREFLGKAGFCRLFIPGFASLAAPLYPLTKPSIPFIWTEEHQQAFDHIKKALLSAPALALPDLTKPFTLYIDERAGVARGVLTQTLGPWRRPVAYLSKKLDPVASGWPTCLKAVAAVALLLKDADKLTLGQNVTVIASHSLESIVRQPPDRWMTNARMTHYQSLLLNERVSFAPPAVLNPATLLPVESEATPVHRCSEILAEETGTRRDLEDQPLPGVPTWYTDGSSFITEGKRRAGAPIVDGKRTVWASSLPEGTSAQKAELVALTQALRLAEGKNINIYTDSRYAFATAHIHGAIYKQRGWLTSAGKDIKNKEEILALLEAIHLPRRVAIIHCPGHQRGSNPVATGNRRADEAAKQAALSTRVLAGTTKPAGKRTADGSEFEKRTADGSEFESPKKKAKVE

SEQ ID NO: 6928 - protein, 2218 aa, synthetic construct
MPAAKRVKLDGGDKKYSIGLDIGTNSVGWAVITDEYKVPSKKFKVLGNTDRHSIKKNLIGALLFDSGETAEATRLKRTARRRYTRRKNRICYLQEIFSNEMAKVDDSFFHRLEESFLVEEDKKHERHPIFGNIVDEVAYHEKYPTIYHLRKKLVDSTDKADLRLIYLALAHMIKFRGHFLIEGDLNPDNSDVDKLFIQLVQTYNQLFEENPINASGVDAKAILSARLSKSRRLENLIAQLPGEKKNGLFGNLIALSLGLTPNFKSNFDLAEDAKLQLSKDTYDDDLDNLLAQIGDQYADLFLAAKNLSDAILLSDILRVNTEITKAPLSASMIKRYDEHHQDLTLLKALVRQQLPEKYKEIFFDQSKNGYAGYIDGGASQEEFYKFIKPILEKMDGTEELLVKLNREDLLRKQRTFDNGSIPHQIHLGELHAILRRQEDFYPFLKDNREKIEKILTFRIPYYVGPLARGNSRFAWMTRKSEETITPWNFEEVVDKGASAQSFIERMTNFDKNLPNEKVLPKHSLLYEYFTVYNELTKVKYVTEGMRKPAFLSGEQKKAIVDLLFKTNRKVTVKQLKEDYFKKIECFDSVEISGVEDRFNASLGTYHDLLKIIKDKDFLDNEENEDILEDIVLTLTLFEDREMIEERLKTYAHLFDDKVMKQLKRRRYTGWGRLSRKLINGIRDKQSGKTILDFLKSDGFANRNFMQLIHDDSLTFKEDIQKAQVSGQGDSLHEHIANLAGSPAIKKGILQTVKVVDELVKVMGRHKPENIVIEMARENQTTQKGQKNSRERMKRIEEGIKELGSQILKEHPVENTQLQNEKLYLYYLQNGRDMYVDQELDINRLSDYDVDHIVPQSFLKDDSIDNKVLTRSDKARGKSDNVPSEEVVKKMKNYWRQLLNAKLITQRKFDNLTKAERGGLSELDKAGFIKRQLVETRQITKHVAQILDSRMNTKYDENDKLIREVKVITLKSKLVSDFRKDFQFYKVREINNYHHAHDAYLNAVVGTALIKKYPKLESEFVYGDYKVYDVRKMIAKSEQEIGKATAKYFFYSNIMNFFKTEITLANGEIRKRPLIETNGETGEIVWDKGRDFATVRKVLSMPQVNIVKKTEVQTGGFSKESILPKRNSDKLIARKKDWDPKKYGGFDSPTVAYSVLVVAKVEKGKSKKLKSVKELLGITIMERSSFEKNPIDFLEAKGYKEVKKDLIIKLPKYSLFELENGRKRMLASAGELQKGNELALPSKYVNFLYLASHYEKLKGSPEDNEQKQLFVEQHKHYLDEIIEQISEFSKRVILADANLDKVLSAYNKHRDKPIREQAENIIHLFTLTNLGAPAAFKYFDTTIDRKRYTSTKEVLDATLIHQSITGLYETRIDLSQLGGDGGGGGEAAAKGGSGGTLGDQGSRGSDPLPEPRVTLTVEGIPTEFLVNTGAEHSVLTKPMGKMGSKRTVVAGATGSKVYPWTTKRLLKIGQKQVTHSFLVIPECPAPLLGRDLLTKLKAQIQFSTEGPQVTWEDRPAMCLVLNLEEEYRLHEKPVPPSIDPSWLQLFPMVWAEKAGMGLANQVPPVVVELKSDASPVAVRQYPMSKEAREGIRPHIQRFLDLGILVPCQSPWNTPLLPVKKPGTNDYRPVQDLREVNKRVQDIHPTVPNPYNLLSSLPPSHTWYSVLDLKDAFFCLKLHPNSQPLFAFEWRDPEKGNTGQLTWTRLPQGFKNSPTLFNEALHRDLASFRALNPQVVMLQYVDDLLVAAPTYRDCKEGTRRLLQELSKLGYRVSAKKAQLCREEVTYLGYLLKGGKRWLTPARKATVMKIPTPTTPRQVREFLGTAGFCRLWIPGFASLAAPLYPLTRPKVPFTWTEAHQEAFGRIKEALLSAPALALPDLTKPFALYVDEKEGVARGVLTQTLGPWRRPVAYLSKKLDPVASGWPTCLKAIAAVALLLKDADKLTLGQNVLVIAPHNLESIVRQPPDRWMTNARMTHYQSLLLNERVSFAPPAILNPATLLPVESDDTPIHICSEILAEETGTRPDLRDQPLPGVPAWYTDGSSFIMDGRRQAGAAIVDNKRTVWASNLPEGTSAQKAELIALTQALRLAEGKSINIYTDSRYAFATAHVHGAIYKQRGWLTSAGKDIKNKEEILALLEAIHLPKRVAIIHCPGHQRGTDPVATGNRKADEAAKQAAQSTRILTETTKNAGKRTADGSEFEKRTADGSEFESPKKKAKVE

SEQ ID NO: 6929 - protein, 2096 aa, synthetic construct
MPAAKRVKLDGGDKKYSIGLDIGTNSVGWAVITDEYKVPSKKFKVLGNTDRHSIKKNLIGALLFDSGETAEATRLKRTARRRYTRRKNRICYLQEIFSNEMAKVDDSFFHRLEESFLVEEDKKHERHPIFGNIVDEVAYHEKYPTIYHLRKKLVDSTDKADLRLIYLALAHMIKFRGHFLIEGDLNPDNSDVDKLFIQLVQTYNQLFEENPINASGVDAKAILSARLSKSRRLENLIAQLPGEKKNGLFGNLIALSLGLTPNFKSNFDLAEDAKLQLSKDTYDDDLDNLLAQIGDQYADLFLAAKNLSDAILLSDILRVNTEITKAPLSASMIKRYDEHHQDLTLLKALVRQQLPEKYKEIFFDQSKNGYAGYIDGGASQEEFYKFIKPILEKMDGTEELLVKLNREDLLRKQRTFDNGSIPHQIHLGELHAILRRQEDFYPFLKDNREKIEKILTFRIPYYVGPLARGNSRFAWMTRKSEETITPWNFEEVVDKGASAQSFIERMTNFDKNLPNEKVLPKHSLLYEYFTVYNELTKVKYVTEGMRKPAFLSGEQKKAIVDLLFKTNRKVTVKQLKEDYFKKIECFDSVEISGVEDRFNASLGTYHDLLKIIKDKDFLDNEENEDILEDIVLTLTLFEDREMIEERLKTYAHLFDDKVMKQLKRRRYTGWGRLSRKLINGIRDKQSGKTILDFLKSDGFANRNFMQLIHDDSLTFKEDIQKAQVSGQGDSLHEHIANLAGSPAIKKGILQTVKVVDELVKVMGRHKPENIVIEMARENQTTQKGQKNSRERMKRIEEGIKELGSQILKEHPVENTQLQNEKLYLYYLQNGRDMYVDQELDINRLSDYDVDHIVPQSFLKDDSIDNKVLTRSDKARGKSDNVPSEEVVKKMKNYWRQLLNAKLITQRKFDNLTKAERGGLSELDKAGFIKRQLVETRQITKHVAQILDSRMNTKYDENDKLIREVKVITLKSKLVSDFRKDFQFYKVREINNYHHAHDAYLNAVVGTALIKKYPKLESEFVYGDYKVYDVRKMIAKSEQEIGKATAKYFFYSNIMNFFKTEITLANGEIRKRPLIETNGETGEIVWDKGRDFATVRKVLSMPQVNIVKKTEVQTGGFSKESILPKRNSDKLIARKKDWDPKKYGGFDSPTVAYSVLVVAKVEKGKSKKLKSVKELLGITIMERSSFEKNPIDFLEAKGYKEVKKDLIIKLPKYSLFELENGRKRMLASAGELQKGNELALPSKYVNFLYLASHYEKLKGSPEDNEQKQLFVEQHKHYLDEIIEQISEFSKRVILADANLDKVLSAYNKHRDKPIREQAENIIHLFTLTNLGAPAAFKYFDTTIDRKRYTSTKEVLDATLIHQSITGLYETRIDLSQLGGDGGGGGEAAAKGGSGGTLNIEDEYRLHETSKGPDVPLGSTWLSDFPQAWAETGGMGLAFRQAPLIISLKATSTPVSIKQYPMSQEARLGIKPHIQRLLDQGILVPCQSPWNTPLLPVKKPGTNDYRPVQDLREVNKRVEDIHPTVPNPYNLLSGLPPSHQWYTVLDLKDAFFCLRLHPTSQSLFAFEWKDPEMGISGQLTWTRLPQGFKNSPTLFNEALHRDLADFRIQHPDLILLQYVDDLLLAATSELDCQQGTRALLQTLGDLGYRASAKKAQICQKQVKYLGYLLKEGQRWLTEARKETVMGQPTPKTPRQLREFLGKAGLCRLFIPGFAEMAAPLYPLTKPGTLFKWGPDQQKAYQEIKQALLTAPALGLPDLTKPFELFVDEKQGYAKGVLTQKLGPWRRPVAYLSKKLDPVAAGWPPCLRMVAAIAVLTKDVGKLTMGQPLVILAPHAVEALVKQPPDRWLSNARMTHYQALLLDTDRVQFGPIVALNPATLLPLPEEGLQHDCLDILAEAHGTRPDLTDQPLPDADHTWYTDGSSFLQEGQRRAGAAVTTETEVIWAKALPAGTSAQRAELIALTQALKMAAGKKLNVYTDSRYAFATAHIHGEIYRRRGWLTSEGKEIKNKDEILALLKALFLPKRLSIIHCPGHQKGNHAEARGNRMADQAAREVATRETPETSTLLAGKRTADGSEFEKRTADGSEFESPKKKAKVE

SEQ ID NO: 6930 - protein, 2096 aa, synthetic construct
MPAAKRVKLDGGDKKYSIGLDIGTNSVGWAVITDEYKVPSKKFKVLGNTDRHSIKKNLIGALLFDSGETAEATRLKRTARRRYTRRKNRICYLQEIFSNEMAKVDDSFFHRLEESFLVEEDKKHERHPIFGNIVDEVAYHEKYPTIYHLRKKLVDSTDKADLRLIYLALAHMIKFRGHFLIEGDLNPDNSDVDKLFIQLVQTYNQLFEENPINASGVDAKAILSARLSKSRRLENLIAQLPGEKKNGLFGNLIALSLGLTPNFKSNFDLAEDAKLQLSKDTYDDDLDNLLAQIGDQYADLFLAAKNLSDAILLSDILRVNTEITKAPLSASMIKRYDEHHQDLTLLKALVRQQLPEKYKEIFFDQSKNGYAGYIDGGASQEEFYKFIKPILEKMDGTEELLVKLNREDLLRKQRTFDNGSIPHQIHLGELHAILRRQEDFYPFLKDNREKIEKILTFRIPYYVGPLARGNSRFAWMTRKSEETITPWNFEEVVDKGASAQSFIERMTNFDKNLPNEKVLPKHSLLYEYFTVYNELTKVKYVTEGMRKPAFLSGEQKKAIVDLLFKTNRKVTVKQLKEDYFKKIECFDSVEISGVEDRFNASLGTYHDLLKIIKDKDFLDNEENEDILEDIVLTLTLFEDREMIEERLKTYAHLFDDKVMKQLKRRRYTGWGRLSRKLINGIRDKQSGKTILDFLKSDGFANRNFMQLIHDDSLTFKEDIQKAQVSGQGDSLHEHIANLAGSPAIKKGILQTVKVVDELVKVMGRHKPENIVIEMARENQTTQKGQKNSRERMKRIEEGIKELGSQILKEHPVENTQLQNEKLYLYYLQNGRDMYVDQELDINRLSDYDVDHIVPQSFLKDDSIDNKVLTRSDKARGKSDNVPSEEVVKKMKNYWRQLLNAKLITQRKFDNLTKAERGGLSELDKAGFIKRQLVETRQITKHVAQILDSRMNTKYDENDKLIREVKVITLKSKLVSDFRKDFQFYKVREINNYHHAHDAYLNAVVGTALIKKYPKLESEFVYGDYKVYDVRKMIAKSEQEIGKATAKYFFYSNIMNFFKTEITLANGEIRKRPLIETNGETGEIVWDKGRDFATVRKVLSMPQVNIVKKTEVQTGGFSKESILPKRNSDKLIARKKDWDPKKYGGFDSPTVAYSVLVVAKVEKGKSKKLKSVKELLGITIMERSSFEKNPIDFLEAKGYKEVKKDLIIKLPKYSLFELENGRKRMLASAGELQKGNELALPSKYVNFLYLASHYEKLKGSPEDNEQKQLFVEQHKHYLDEIIEQISEFSKRVILADANLDKVLSAYNKHRDKPIREQAENIIHLFTLTNLGAPAAFKYFDTTIDRKRYTSTKEVLDATLIHQSITGLYETRIDLSQLGGDGGGGGEAAAKGGSGGTLNIEDEYRLHETSKGPDVPLGSTWLSDFPQAWAETGGMGLAVRQAPLIIPLKATSTPVSIKQYPMSQEARLGIKPHIQRLLDQGILVPCQSPWNTPLLPVKKPGTNDYRPVQDLREVNKRVEDIHPTVPNPYNLLSGLPPSHQWYTVLDLKDAFFCLRLHPTSQSLFAFEWRDPEMGISGQLTWTRLPQGFKNSPTLFNEALHRDLADFRIQHPDLILLQYVDDLLLAATSELDCQQGTRALLQTLGDLGYRASAKKAQICQKQVKYLGYLLKEGQRWLTEARKETVMGQPTPKTPRQLREFLGTAGFCRLWIPGFAEMAAPLYPLTKPGTLFEWGPDQQKAYQEIKQALLTAPALGLPDLTKPFELFVDEKQGYAKGVLTQKLGPWRRPVAYLSKKLDPVAAGWPPCLRMVAAIAVLTKDAGKLTMGQPLVILAPHAVEALVKQPPDRWLSNARMTHYQALLLDTDRVQFGPIVALNPATLLPLPEEGLQHDCLDILAEAHGTRPDLTDQPLPDADHTWYTDGSSFLQEGQRKAGAAVTTETEVVWAKALPAGTSAQRAELIALTQALKMAEGKKLNVYTDSRYAFATAHIHGEIYRRRGWLTSEGKEIKNKDEILALLKALFLPKRLSIIHCPGHQKGNRAEARGNRMADQAAREVATRETPETSTLLAGKRTADGSEFEKRTADGSEFESPKKKAKVE

SEQ ID NO: 6931 - protein, 2090 aa, synthetic construct
MPAAKRVKLDGGDKKYSIGLDIGTNSVGWAVITDEYKVPSKKFKVLGNTDRHSIKKNLIGALLFDSGETAEATRLKRTARRRYTRRKNRICYLQEIFSNEMAKVDDSFFHRLEESFLVEEDKKHERHPIFGNIVDEVAYHEKYPTIYHLRKKLVDSTDKADLRLIYLALAHMIKFRGHFLIEGDLNPDNSDVDKLFIQLVQTYNQLFEENPINASGVDAKAILSARLSKSRRLENLIAQLPGEKKNGLFGNLIALSLGLTPNFKSNFDLAEDAKLQLSKDTYDDDLDNLLAQIGDQYADLFLAAKNLSDAILLSDILRVNTEITKAPLSASMIKRYDEHHQDLTLLKALVRQQLPEKYKEIFFDQSKNGYAGYIDGGASQEEFYKFIKPILEKMDGTEELLVKLNREDLLRKQRTFDNGSIPHQIHLGELHAILRRQEDFYPFLKDNREKIEKILTFRIPYYVGPLARGNSRFAWMTRKSEETITPWNFEEVVDKGASAQSFIERMTNFDKNLPNEKVLPKHSLLYEYFTVYNELTKVKYVTEGMRKPAFLSGEQKKAIVDLLFKTNRKVTVKQLKEDYFKKIECFDSVEISGVEDRFNASLGTYHDLLKIIKDKDFLDNEENEDILEDIVLTLTLFEDREMIEERLKTYAHLFDDKVMKQLKRRRYTGWGRLSRKLINGIRDKQSGKTILDFLKSDGFANRNFMQLIHDDSLTFKEDIQKAQVSGQGDSLHEHIANLAGSPAIKKGILQTVKVVDELVKVMGRHKPENIVIEMARENQTTQKGQKNSRERMKRIEEGIKELGSQILKEHPVENTQLQNEKLYLYYLQNGRDMYVDQELDINRLSDYDVDHIVPQSFLKDDSIDNKVLTRSDKARGKSDNVPSEEVVKKMKNYWRQLLNAKLITQRKFDNLTKAERGGLSELDKAGFIKRQLVETRQITKHVAQILDSRMNTKYDENDKLIREVKVITLKSKLVSDFRKDFQFYKVREINNYHHAHDAYLNAVVGTALIKKYPKLESEFVYGDYKVYDVRKMIAKSEQEIGKATAKYFFYSNIMNFFKTEITLANGEIRKRPLIETNGETGEIVWDKGRDFATVRKVLSMPQVNIVKKTEVQTGGFSKESILPKRNSDKLIARKKDWDPKKYGGFDSPTVAYSVLVVAKVEKGKSKKLKSVKELLGITIMERSSFEKNPIDFLEAKGYKEVKKDLIIKLPKYSLFELENGRKRMLASAGELQKGNELALPSKYVNFLYLASHYEKLKGSPEDNEQKQLFVEQHKHYLDEIIEQISEFSKRVILADANLDKVLSAYNKHRDKPIREQAENIIHLFTLTNLGAPAAFKYFDTTIDRKRYTSTKEVLDATLIHQSITGLYETRIDLSQLGGDGGGGGEAAAKGGSGGTLQLDDEYRLYSPLVKPDQNIQFWLEQFPQAWAETAGMGLAKQVPPQVIQLKASATPVSVRQYPLSKEAQEGIRPHVQRLIQQGILVPVQSPWNTPLLPVRKPGTNDYRPVQDLREVNKRVQDIHPTVPNPYNLLCALPPQRSWYTVLDLKDAFFCLRLHPTSQPLFAFEWRDPGTGRTGQLTWTRLPQGFKNSPTIFDEALHRDLANFRIQHPQVTLLQYVDDLLLAGATKQDCLEGTKALLLELSDLGYRASAKKAQICRREVTYLGYSLRDGQRWLTEARKKTVVQIPAPTTAKQVREFLGTAGFCRLWIPGFATLAAPLYPLTKEKGEFSWAPEHQKAFDAIKKALLSAPALALPDVTKPFTLYVDERKGVARGVLTQTLGPWRRPVAYLSKKLDPVASGWPVCLKAIAAVAILVKDADKLTLGQNITVIAPHALENIVRQPPDRWMTNARMTHYQSLLLTERVTFAPPAALNPATLLPEETDEPVTHDCHQLLIEETGVRKDLTDIPLTGEVLTWFTDGSSYVVEGKRMAGAAVVDGTRTIWASSLPEGTSAQKAELMALTQALRLAEGKSINIYTDSRYAFATAHVHGAIYKQRGLLTSAGREIKNKEEILSLLEALHLPKRLAIIHCPGHQKAKDPISRGNQMADRVAKQAAQGVNLLAGKRTADGSEFEKRTADGSEFESPKKKAKVE

SEQ ID NO: 6932 - protein, 2087 aa, synthetic construct
MPAAKRVKLDGGDKKYSIGLDIGTNSVGWAVITDEYKVPSKKFKVLGNTDRHSIKKNLIGALLFDSGETAEATRLKRTARRRYTRRKNRICYLQEIFSNEMAKVDDSFFHRLEESFLVEEDKKHERHPIFGNIVDEVAYHEKYPTIYHLRKKLVDSTDKADLRLIYLALAHMIKFRGHFLIEGDLNPDNSDVDKLFIQLVQTYNQLFEENPINASGVDAKAILSARLSKSRRLENLIAQLPGEKKNGLFGNLIALSLGLTPNFKSNFDLAEDAKLQLSKDTYDDDLDNLLAQIGDQYADLFLAAKNLSDAILLSDILRVNTEITKAPLSASMIKRYDEHHQDLTLLKALVRQQLPEKYKEIFFDQSKNGYAGYIDGGASQEEFYKFIKPILEKMDGTEELLVKLNREDLLRKQRTFDNGSIPHQIHLGELHAILRRQEDFYPFLKDNREKIEKILTFRIPYYVGPLARGNSRFAWMTRKSEETITPWNFEEVVDKGASAQSFIERMTNFDKNLPNEKVLPKHSLLYEYFTVYNELTKVKYVTEGMRKPAFLSGEQKKAIVDLLFKTNRKVTVKQLKEDYFKKIECFDSVEISGVEDRFNASLGTYHDLLKIIKDKDFLDNEENEDILEDIVLTLTLFEDREMIEERLKTYAHLFDDKVMKQLKRRRYTGWGRLSRKLINGIRDKQSGKTILDFLKSDGFANRNFMQLIHDDSLTFKEDIQKAQVSGQGDSLHEHIANLAGSPAIKKGILQTVKVVDELVKVMGRHKPENIVIEMARENQTTQKGQKNSRERMKRIEEGIKELGSQILKEHPVENTQLQNEKLYLYYLQNGRDMYVDQELDINRLSDYDVDHIVPQSFLKDDSIDNKVLTRSDKARGKSDNVPSEEVVKKMKNYWRQLLNAKLITQRKFDNLTKAERGGLSELDKAGFIKRQLVETRQITKHVAQILDSRMNTKYDENDKLIREVKVITLKSKLVSDFRKDFQFYKVREINNYHHAHDAYLNAVVGTALIKKYPKLESEFVYGDYKVYDVRKMIAKSEQEIGKATAKYFFYSNIMNFFKTEITLANGEIRKRPLIETNGETGEIVWDKGRDFATVRKVLSMPQVNIVKKTEVQTGGFSKESILPKRNSDKLIARKKDWDPKKYGGFDSPTVAYSVLVVAKVEKGKSKKLKSVKELLGITIMERSSFEKNPIDFLEAKGYKEVKKDLIIKLPKYSLFELENGRKRMLASAGELQKGNELALPSKYVNFLYLASHYEKLKGSPEDNEQKQLFVEQHKHYLDEIIEQISEFSKRVILADANLDKVLSAYNKHRDKPIREQAENIIHLFTLTNLGAPAAFKYFDTTIDRKRYTSTKEVLDATLIHQSITGLYETRIDLSQLGGDGGGGGEAAAKGGSGGIPWLMKKPLQLTTLVPLQEYEERLLKQTMLTGSYKEKLQSLFLKYDALWQHWENQVGHRRIKPHHIATGTVNPRPQKQYPINPKAKASIQTVINDLLKQGVLIQQNSIMNTPVYPVPKPDGKWRMVLDYREVNKTIPLIAAQNQHSAGILSSIFRGKYKTTLDLSNGFWAHSITPESYWLTAFTWLGQQYCWTRLPQGFLNSPALFNADVVDLLKEVPNVQVYVDDIYISHDDPREHLEQLEKVFSLLLNAGYVVSLKKSEIAQHEVEFLGFNITKEGRGLTETFKQKLLNITPPRDLKQLQSILGLLNFARNFIPNFSELVKPLYNIIATAPGKYITWTTDNSQQLQNIISMLNSAENLEERNPEVRLIMKVNTSPSAGYIRFYNEFAKRPIMYLNYVYTKAEVKFTNTEKLLTTIHKGLIKALDLGMGQEILVYSPIVSMTKIQKTPLPERKALPIRWITWMSYLEDPRIQFHYDKTLPELQQVPTVTDDIIAKIKHPSEFSMVFYTDGSAIKHPNVNKSHNAGMGIAQVQFKPEFTVINTWSIPLGDHTAQLAEVAAVEFACKKALKIDGPVLIVTDSFYVAESVNKELPYWQSNGFFNNKKKPLKHVSKWKSIADCIQLKPDIIIIHEKGHQPTASTFHTEGNNLADKLATQGSYVVNAGKRTADGSEFEKRTADGSEFESPKKKAKVE

SEQ ID NO: 6933 - protein, 2098 aa, synthetic construct
MPAAKRVKLDGGDKKYSIGLDIGTNSVGWAVITDEYKVPSKKFKVLGNTDRHSIKKNLIGALLFDSGETAEATRLKRTARRRYTRRKNRICYLQEIFSNEMAKVDDSFFHRLEESFLVEEDKKHERHPIFGNIVDEVAYHEKYPTIYHLRKKLVDSTDKADLRLIYLALAHMIKFRGHFLIEGDLNPDNSDVDKLFIQLVQTYNQLFEENPINASGVDAKAILSARLSKSRRLENLIAQLPGEKKNGLFGNLIALSLGLTPNFKSNFDLAEDAKLQLSKDTYDDDLDNLLAQIGDQYADLFLAAKNLSDAILLSDILRVNTEITKAPLSASMIKRYDEHHQDLTLLKALVRQQLPEKYKEIFFDQSKNGYAGYIDGGASQEEFYKFIKPILEKMDGTEELLVKLNREDLLRKQRTFDNGSIPHQIHLGELHAILRRQEDFYPFLKDNREKIEKILTFRIPYYVGPLARGNSRFAWMTRKSEETITPWNFEEVVDKGASAQSFIERMTNFDKNLPNEKVLPKHSLLYEYFTVYNELTKVKYVTEGMRKPAFLSGEQKKAIVDLLFKTNRKVTVKQLKEDYFKKIECFDSVEISGVEDRFNASLGTYHDLLKIIKDKDFLDNEENEDILEDIVLTLTLFEDREMIEERLKTYAHLFDDKVMKQLKRRRYTGWGRLSRKLINGIRDKQSGKTILDFLKSDGFANRNFMQLIHDDSLTFKEDIQKAQVSGQGDSLHEHIANLAGSPAIKKGILQTVKVVDELVKVMGRHKPENIVIEMARENQTTQKGQKNSRERMKRIEEGIKELGSQILKEHPVENTQLQNEKLYLYYLQNGRDMYVDQELDINRLSDYDVDHIVPQSFLKDDSIDNKVLTRSDKARGKSDNVPSEEVVKKMKNYWRQLLNAKLITQRKFDNLTKAERGGLSELDKAGFIKRQLVETRQITKHVAQILDSRMNTKYDENDKLIREVKVITLKSKLVSDFRKDFQFYKVREINNYHHAHDAYLNAVVGTALIKKYPKLESEFVYGDYKVYDVRKMIAKSEQEIGKATAKYFFYSNIMNFFKTEITLANGEIRKRPLIETNGETGEIVWDKGRDFATVRKVLSMPQVNIVKKTEVQTGGFSKESILPKRNSDKLIARKKDWDPKKYGGFDSPTVAYSVLVVAKVEKGKSKKLKSVKELLGITIMERSSFEKNPIDFLEAKGYKEVKKDLIIKLPKYSLFELENGRKRMLASAGELQKGNELALPSKYVNFLYLASHYEKLKGSPEDNEQKQLFVEQHKHYLDEIIEQISEFSKRVILADANLDKVLSAYNKHRDKPIREQAENIIHLFTLTNLGAPAAFKYFDTTIDRKRYTSTKEVLDATLIHQSITGLYETRIDLSQLGGDGGEAAAKGGSGGGGGTAPLEEEYRLFLEAPIQNVTLLEQWKREIPKVWAEINPPGLASTQAPIHVQLLSTALPVRVRQYPITLEAKRSLRETIRKFRAAGILRPVHSPWNTPLLPVRKSGTSEYRMVQDLREVNKRVETIHPTVPNPYTLLSLLPPDRIWYSVLDLKDAFFCIPLAPESQLIFAFEWADAEEGESGQLTWTRLPQGFKNSPTLFNEALNRDLQGFRLDHPSVSLLQYVDDLLIAADTQAACLSATRDLLMTLAELGYRVSGKKAQLCQEEVTYLGFKIHKGSRSLSNSRTQAILQIPVPKTKRQVREFLGTIGYCRLWIPGFAELAQPLYAATRPGNDPLVWGEKEEEAFQSLKLALTQPPALALPSLDKPFQLFVEETSGAAKGVLTQALGPWKRPVAYLSKRLDPVAAGWPRCLRAIAAAALLTREASKLTFGQDIEITSSHNLESLLRSPPDKWLTNARITQYQVLLLDPPRVRFKQTAALNPATLLPETDDTLPIHHCLDTLDSLTSTRPDLTDQPLAQAEATLFTDGSSYIRDGKRYAGAAVVTLDSVIWAEPLPIGTSAQKAELIALTKALEWSKDKSVNIYTDSRYAFATLHVHGMIYRERGWLTAGGKAIKNAPEILALLTAVWLPKRVAVMHCKGHQKDDAPTSTGNRRADEVAREVAIRPLSTQATISAGKRTADGSEFEKRTADGSEFESPKKKAKVE

SEQ ID NO: 6934 - protein, 2102 aa, synthetic construct
MPAAKRVKLDGGDKKYSIGLDIGTNSVGWAVITDEYKVPSKKFKVLGNTDRHSIKKNLIGALLFDSGETAEATRLKRTARRRYTRRKNRICYLQEIFSNEMAKVDDSFFHRLEESFLVEEDKKHERHPIFGNIVDEVAYHEKYPTIYHLRKKLVDSTDKADLRLIYLALAHMIKFRGHFLIEGDLNPDNSDVDKLFIQLVQTYNQLFEENPINASGVDAKAILSARLSKSRRLENLIAQLPGEKKNGLFGNLIALSLGLTPNFKSNFDLAEDAKLQLSKDTYDDDLDNLLAQIGDQYADLFLAAKNLSDAILLSDILRVNTEITKAPLSASMIKRYDEHHQDLTLLKALVRQQLPEKYKEIFFDQSKNGYAGYIDGGASQEEFYKFIKPILEKMDGTEELLVKLNREDLLRKQRTFDNGSIPHQIHLGELHAILRRQEDFYPFLKDNREKIEKILTFRIPYYVGPLARGNSRFAWMTRKSEETITPWNFEEVVDKGASAQSFIERMTNFDKNLPNEKVLPKHSLLYEYFTVYNELTKVKYVTEGMRKPAFLSGEQKKAIVDLLFKTNRKVTVKQLKEDYFKKIECFDSVEISGVEDRFNASLGTYHDLLKIIKDKDFLDNEENEDILEDIVLTLTLFEDREMIEERLKTYAHLFDDKVMKQLKRRRYTGWGRLSRKLINGIRDKQSGKTILDFLKSDGFANRNFMQLIHDDSLTFKEDIQKAQVSGQGDSLHEHIANLAGSPAIKKGILQTVKVVDELVKVMGRHKPENIVIEMARENQTTQKGQKNSRERMKRIEEGIKELGSQILKEHPVENTQLQNEKLYLYYLQNGRDMYVDQELDINRLSDYDVDHIVPQSFLKDDSIDNKVLTRSDKARGKSDNVPSEEVVKKMKNYWRQLLNAKLITQRKFDNLTKAERGGLSELDKAGFIKRQLVETRQITKHVAQILDSRMNTKYDENDKLIREVKVITLKSKLVSDFRKDFQFYKVREINNYHHAHDAYLNAVVGTALIKKYPKLESEFVYGDYKVYDVRKMIAKSEQEIGKATAKYFFYSNIMNFFKTEITLANGEIRKRPLIETNGETGEIVWDKGRDFATVRKVLSMPQVNIVKKTEVQTGGFSKESILPKRNSDKLIARKKDWDPKKYGGFDSPTVAYSVLVVAKVEKGKSKKLKSVKELLGITIMERSSFEKNPIDFLEAKGYKEVKKDLIIKLPKYSLFELENGRKRMLASAGELQKGNELALPSKYVNFLYLASHYEKLKGSPEDNEQKQLFVEQHKHYLDEIIEQISEFSKRVILADANLDKVLSAYNKHRDKPIREQAENIIHLFTLTNLGAPAAFKYFDTTIDRKRYTSTKEVLDATLIHQSITGLYETRIDLSQLGGDGGEAAAKGGSGGGGGTVSLQDEHRLFDIPVTTSLPDVWLQDFPQAWAETGGLGRAKCQAPIIIDLKPTAVPVSIKQYPMSLEAHMGIRQHIIKFLELGVLRPCRSPWNTPLLPVKKPGTQDYRPVQDLREINKRTVDIHPTVPNPYNLLSTLKPDYSWYTVLDLKDAFFCLPLAPQSQELFAFEWKDPERGISGQLTWTRLPQGFKNSPTLFDEALHRDLTDFRTQHPEVTLLQYVDDLLLAAPTKKACTQGTRHLLQELGEKGYRASAKKAQICQTKVTYLGYILSEGKRWLTPGRIETVARIPPPRNPREVREFLGTAGFCRLWIPGFAELAAPLYALTKESTPFTWQTEHQLAFEALKKALLSAPALGLPDTSKPFTLFLDERQGIAKGVLTQKLGPWKRPVAYLSKKLDPVAAGWPPCLRIMAATAMLVKDSAKLTLGQPLTVITPHTLEAIVRQPPDRWITNARLTHYQALLLDTDRVQFGPPVTLNPATLLPVPENQPSPHDCRQVLAETHGTREDLKDQELPDADHTWYTDGSSYLDSGTRRAGAAVVDGHNTIWAQSLPPGTSAQKAELIALTKALELSKGKKANIYTDSRYAFATAHTHGSIYERRGLLTSEGKEIKNKAEIIALLKALFLPQEVAIIHCPGHQKGQDPVAVGNRQADRVARQAAMAEVLTLATEPDNTSHITAGKRTADGSEFEKRTADGSEFESPKKKAKVE

SEQ ID NO: 6935 - protein, 2102 aa, synthetic construct
MPAAKRVKLDGGDKKYSIGLDIGTNSVGWAVITDEYKVPSKKFKVLGNTDRHSIKKNLIGALLFDSGETAEATRLKRTARRRYTRRKNRICYLQEIFSNEMAKVDDSFFHRLEESFLVEEDKKHERHPIFGNIVDEVAYHEKYPTIYHLRKKLVDSTDKADLRLIYLALAHMIKFRGHFLIEGDLNPDNSDVDKLFIQLVQTYNQLFEENPINASGVDAKAILSARLSKSRRLENLIAQLPGEKKNGLFGNLIALSLGLTPNFKSNFDLAEDAKLQLSKDTYDDDLDNLLAQIGDQYADLFLAAKNLSDAILLSDILRVNTEITKAPLSASMIKRYDEHHQDLTLLKALVRQQLPEKYKEIFFDQSKNGYAGYIDGGASQEEFYKFIKPILEKMDGTEELLVKLNREDLLRKQRTFDNGSIPHQIHLGELHAILRRQEDFYPFLKDNREKIEKILTFRIPYYVGPLARGNSRFAWMTRKSEETITPWNFEEVVDKGASAQSFIERMTNFDKNLPNEKVLPKHSLLYEYFTVYNELTKVKYVTEGMRKPAFLSGEQKKAIVDLLFKTNRKVTVKQLKEDYFKKIECFDSVEISGVEDRFNASLGTYHDLLKIIKDKDFLDNEENEDILEDIVLTLTLFEDREMIEERLKTYAHLFDDKVMKQLKRRRYTGWGRLSRKLINGIRDKQSGKTILDFLKSDGFANRNFMQLIHDDSLTFKEDIQKAQVSGQGDSLHEHIANLAGSPAIKKGILQTVKVVDELVKVMGRHKPENIVIEMARENQTTQKGQKNSRERMKRIEEGIKELGSQILKEHPVENTQLQNEKLYLYYLQNGRDMYVDQELDINRLSDYDVDHIVPQSFLKDDSIDNKVLTRSDKARGKSDNVPSEEVVKKMKNYWRQLLNAKLITQRKFDNLTKAERGGLSELDKAGFIKRQLVETRQITKHVAQILDSRMNTKYDENDKLIREVKVITLKSKLVSDFRKDFQFYKVREINNYHHAHDAYLNAVVGTALIKKYPKLESEFVYGDYKVYDVRKMIAKSEQEIGKATAKYFFYSNIMNFFKTEITLANGEIRKRPLIETNGETGEIVWDKGRDFATVRKVLSMPQVNIVKKTEVQTGGFSKESILPKRNSDKLIARKKDWDPKKYGGFDSPTVAYSVLVVAKVEKGKSKKLKSVKELLGITIMERSSFEKNPIDFLEAKGYKEVKKDLIIKLPKYSLFELENGRKRMLASAGELQKGNELALPSKYVNFLYLASHYEKLKGSPEDNEQKQLFVEQHKHYLDEIIEQISEFSKRVILADANLDKVLSAYNKHRDKPIREQAENIIHLFTLTNLGAPAAFKYFDTTIDRKRYTSTKEVLDATLIHQSITGLYETRIDLSQLGGDGGEAAAKGGSGGGGGTVSLQDEHRLFDIPVTTSLPDVWLQDFPQAWAETGGLGRAKCQAPIIIDLKPTAVPVSIKQYPMSLEAHMGIRQHIIKFLELGVLRPCRSPWNTPLLPVKKPGTQDYRPVQDLREINKRTVDIHPTVPNPYNLLSTLKPDYSWYTVLDLKDAFFCLPLAPQSQELFAFEWKDPERGISGQLTWTRLPQGFKNSPTLFNEALHRDLTDFRTQHPEVTLLQYVDDLLLAAPTKKACTQGTRHLLQELGEKGYRASAKKAQICQTKVTYLGYILSEGKRWLTPGRIETVARIPPPRNPREVREFLGTAGFCRLWIPGFAELAAPLYALTKPSTPFTWQTEHQLAFEALKKALLSAPALGLPDTSKPFTLFLDERQGIAKGVLTQKLGPWKRPVAYLSKKLDPVAAGWPPCLRIMAATAMLVKDSAKLTLGQPLTVITPHTLEAIVRQPPDRWITNARLTHYQALLLDTDRVQFGPPVTLNPATLLPVPENQPSPHDCRQVLAETHGTREDLKDQELPDADHTWYTDGSSYLDSGTRRAGAAVVDGHNTIWAQSLPPGTSAQKAELIALTKALELSKGKKANIYTDSRYAFATAHTHGSIYERRGWLTSEGKEIKNKAEIIALLKALFLPQEVAIIHCPGHQKGQDPVAVGNRQADRVARQAAMAEVLTLATEPDNTSHITAGKRTADGSEFEKRTADGSEFESPKKKAKVE

SEQ ID NO: 6936 - protein, 2087 aa, synthetic construct
MPAAKRVKLDGGDKKYSIGLDIGTNSVGWAVITDEYKVPSKKFKVLGNTDRHSIKKNLIGALLFDSGETAEATRLKRTARRRYTRRKNRICYLQEIFSNEMAKVDDSFFHRLEESFLVEEDKKHERHPIFGNIVDEVAYHEKYPTIYHLRKKLVDSTDKADLRLIYLALAHMIKFRGHFLIEGDLNPDNSDVDKLFIQLVQTYNQLFEENPINASGVDAKAILSARLSKSRRLENLIAQLPGEKKNGLFGNLIALSLGLTPNFKSNFDLAEDAKLQLSKDTYDDDLDNLLAQIGDQYADLFLAAKNLSDAILLSDILRVNTEITKAPLSASMIKRYDEHHQDLTLLKALVRQQLPEKYKEIFFDQSKNGYAGYIDGGASQEEFYKFIKPILEKMDGTEELLVKLNREDLLRKQRTFDNGSIPHQIHLGELHAILRRQEDFYPFLKDNREKIEKILTFRIPYYVGPLARGNSRFAWMTRKSEETITPWNFEEVVDKGASAQSFIERMTNFDKNLPNEKVLPKHSLLYEYFTVYNELTKVKYVTEGMRKPAFLSGEQKKAIVDLLFKTNRKVTVKQLKEDYFKKIECFDSVEISGVEDRFNASLGTYHDLLKIIKDKDFLDNEENEDILEDIVLTLTLFEDREMIEERLKTYAHLFDDKVMKQLKRRRYTGWGRLSRKLINGIRDKQSGKTILDFLKSDGFANRNFMQLIHDDSLTFKEDIQKAQVSGQGDSLHEHIANLAGSPAIKKGILQTVKVVDELVKVMGRHKPENIVIEMARENQTTQKGQKNSRERMKRIEEGIKELGSQILKEHPVENTQLQNEKLYLYYLQNGRDMYVDQELDINRLSDYDVDHIVPQSFLKDDSIDNKVLTRSDKARGKSDNVPSEEVVKKMKNYWRQLLNAKLITQRKFDNLTKAERGGLSELDKAGFIKRQLVETRQITKHVAQILDSRMNTKYDENDKLIREVKVITLKSKLVSDFRKDFQFYKVREINNYHHAHDAYLNAVVGTALIKKYPKLESEFVYGDYKVYDVRKMIAKSEQEIGKATAKYFFYSNIMNFFKTEITLANGEIRKRPLIETNGETGEIVWDKGRDFATVRKVLSMPQVNIVKKTEVQTGGFSKESILPKRNSDKLIARKKDWDPKKYGGFDSPTVAYSVLVVAKVEKGKSKKLKSVKELLGITIMERSSFEKNPIDFLEAKGYKEVKKDLIIKLPKYSLFELENGRKRMLASAGELQKGNELALPSKYVNFLYLASHYEKLKGSPEDNEQKQLFVEQHKHYLDEIIEQISEFSKRVILADANLDKVLSAYNKHRDKPIREQAENIIHLFTLTNLGAPAAFKYFDTTIDRKRYTSTKEVLDATLIHQSITGLYETRIDLSQLGGDGGEAAAKGGSGGGGGVPWILKKPLELTIKLDLEEQQGTLLNNSILSKKGKEELKQLFEKYSALWQSWENQVGHRRIRPHKIATGTVKPTPQKQYHINPKAKPDIQIVINDLLKQGVLIQKESTMNTPVYPVPKPNGRWRMVLDYRAVNKVTPLIAVQNQHSYGILGSLFKGRYKTTIDLSNGFWAHPIVPEDYWITAFTWQGKQYCWTVLPQGFLNSPGLFTGDVVDLLQGIPNVEVYVDDVYISHDSEKEHLEYLDILFNRLKEAGYIISLKKSNIANSIVDFLGFQITNEGRGLTDTFKEKLENITAPTTLKQLQSILGLLNFARNFIPDFTELIAPLYALIPKSTKNYVPWQIEHSTTLETLITKLNGAEYLQGRKGDKTLIMKVNASYTTGYIRYYNEGEKKPISYVSIVFSKTELKFTELEKLLTTVHKGLLKALDLSMGQNIHVYSPIVSMQNIQKTPQTAKKALASRWLSWLSYLEDPRIRFFYDPQMPALKDLPAVDTGKDNKKHPSNFQHIFYTDGSAITSPTKEGHLNAGMGIVYFINKDGNLQKQQEWSISLGNHTAQFAEIAAFEFALKKCLPLGGNILVVTDSNYVAKAYNEELDVWASNGFVNNRKKPLKHISKWKSVADLKRLRPDVVVTHEPGHQKLDSSPHAYGNNLADQLATQASFKVHAGKRTADGSEFEKRTADGSEFESPKKKAKVE

SEQ ID NO: 6937 - protein, 2173 aa, synthetic construct
MPAAKRVKLDGGDKKYSIGLDIGTNSVGWAVITDEYKVPSKKFKVLGNTDRHSIKKNLIGALLFDSGETAEATRLKRTARRRYTRRKNRICYLQEIFSNEMAKVDDSFFHRLEESFLVEEDKKHERHPIFGNIVDEVAYHEKYPTIYHLRKKLVDSTDKADLRLIYLALAHMIKFRGHFLIEGDLNPDNSDVDKLFIQLVQTYNQLFEENPINASGVDAKAILSARLSKSRRLENLIAQLPGEKKNGLFGNLIALSLGLTPNFKSNFDLAEDAKLQLSKDTYDDDLDNLLAQIGDQYADLFLAAKNLSDAILLSDILRVNTEITKAPLSASMIKRYDEHHQDLTLLKALVRQQLPEKYKEIFFDQSKNGYAGYIDGGASQEEFYKFIKPILEKMDGTEELLVKLNREDLLRKQRTFDNGSIPHQIHLGELHAILRRQEDFYPFLKDNREKIEKILTFRIPYYVGPLARGNSRFAWMTRKSEETITPWNFEEVVDKGASAQSFIERMTNFDKNLPNEKVLPKHSLLYEYFTVYNELTKVKYVTEGMRKPAFLSGEQKKAIVDLLFKTNRKVTVKQLKEDYFKKIECFDSVEISGVEDRFNASLGTYHDLLKIIKDKDFLDNEENEDILEDIVLTLTLFEDREMIEERLKTYAHLFDDKVMKQLKRRRYTGWGRLSRKLINGIRDKQSGKTILDFLKSDGFANRNFMQLIHDDSLTFKEDIQKAQVSGQGDSLHEHIANLAGSPAIKKGILQTVKVVDELVKVMGRHKPENIVIEMARENQTTQKGQKNSRERMKRIEEGIKELGSQILKEHPVENTQLQNEKLYLYYLQNGRDMYVDQELDINRLSDYDVDHIVPQSFLKDDSIDNKVLTRSDKARGKSDNVPSEEVVKKMKNYWRQLLNAKLITQRKFDNLTKAERGGLSELDKAGFIKRQLVETRQITKHVAQILDSRMNTKYDENDKLIREVKVITLKSKLVSDFRKDFQFYKVREINNYHHAHDAYLNAVVGTALIKKYPKLESEFVYGDYKVYDVRKMIAKSEQEIGKATAKYFFYSNIMNFFKTEITLANGEIRKRPLIETNGETGEIVWDKGRDFATVRKVLSMPQVNIVKKTEVQTGGFSKESILPKRNSDKLIARKKDWDPKKYGGFDSPTVAYSVLVVAKVEKGKSKKLKSVKELLGITIMERSSFEKNPIDFLEAKGYKEVKKDLIIKLPKYSLFELENGRKRMLASAGELQKGNELALPSKYVNFLYLASHYEKLKGSPEDNEQKQLFVEQHKHYLDEIIEQISEFSKRVILADANLDKVLSAYNKHRDKPIREQAENIIHLFTLTNLGAPAAFKYFDTTIDRKRYTSTKEVLDATLIHQSITGLYETRIDLSQLGGDGGEAAAKGGSGGGGGMDLLKPLTVERKGVKIKGYWNSQADITCVPKDLLQGEEPVRQQNVTTIHGTQEGDVYYVNLKIDGRRINTEVIGTTLDYAIITPGDVPWILKKPLELTIKLDLEEQQGTLLNNSILSKKGKEELKQLFEKYSALWQSWENQVGHRRIRPHKIATGTVKPTPQKQYHINPKAKPDIQIVINDLLKQGVLIQKESTMNTPVYPVPKPNGRWRMVLDYRAVNKVTPLIAVQNQHSYGILGSLFKGRYKTTIDLSNGFWAHPIVPEDYWITAFTWQGKQYCWTVLPQGFLNSPGLFNGDVVDLLQGIPNVEVYVDDVYISHDSEKEHLEYLDILFNRLKEAGYIISLKKSNIANSIVDFLGFQITNEGRGLTDTFKEKLENITAPTTLKQLQSILGKLNFARNFIPDFTELIAPLYALIPKSPKNYVPWQIEHSTTLETLITKLNGAEYLQGRKGDKTLIMKVNASYTTGYIRYYNEGEKKPISYVSIVFSKTELKFTELEKLLTTVHKGLLKALDLSMGQNIHVYSPIVSMQNIQKTPQTAKKALASRWLSWLSYLEDPRIRFFYDPQMPALKDLPAVDTGKDNKKHPSNFQHIFYTDGSAITSPTKEGHLNAGMGIVYFINKDGNLQKQQEWSISLGNHTAQFAEIAAFEFALKKCLPLGGNILVVTDSNYVAKAYNEELDVWASNGFVNNRKKPLKHISKWKSVADLKRLRPDVVVTHEPGHQKLDSSPHAYGNNLADQLATQASFKVHAGKRTADGSEFEKRTADGSEFESPKKKAKVE

SEQ ID NO: 6938 - protein, 2095 aa, synthetic construct
MPAAKRVKLDGGDKKYSIGLDIGTNSVGWAVITDEYKVPSKKFKVLGNTDRHSIKKNLIGALLFDSGETAEATRLKRTARRRYTRRKNRICYLQEIFSNEMAKVDDSFFHRLEESFLVEEDKKHERHPIFGNIVDEVAYHEKYPTIYHLRKKLVDSTDKADLRLIYLALAHMIKFRGHFLIEGDLNPDNSDVDKLFIQLVQTYNQLFEENPINASGVDAKAILSARLSKSRRLENLIAQLPGEKKNGLFGNLIALSLGLTPNFKSNFDLAEDAKLQLSKDTYDDDLDNLLAQIGDQYADLFLAAKNLSDAILLSDILRVNTEITKAPLSASMIKRYDEHHQDLTLLKALVRQQLPEKYKEIFFDQSKNGYAGYIDGGASQEEFYKFIKPILEKMDGTEELLVKLNREDLLRKQRTFDNGSIPHQIHLGELHAILRRQEDFYPFLKDNREKIEKILTFRIPYYVGPLARGNSRFAWMTRKSEETITPWNFEEVVDKGASAQSFIERMTNFDKNLPNEKVLPKHSLLYEYFTVYNELTKVKYVTEGMRKPAFLSGEQKKAIVDLLFKTNRKVTVKQLKEDYFKKIECFDSVEISGVEDRFNASLGTYHDLLKIIKDKDFLDNEENEDILEDIVLTLTLFEDREMIEERLKTYAHLFDDKVMKQLKRRRYTGWGRLSRKLINGIRDKQSGKTILDFLKSDGFANRNFMQLIHDDSLTFKEDIQKAQVSGQGDSLHEHIANLAGSPAIKKGILQTVKVVDELVKVMGRHKPENIVIEMARENQTTQKGQKNSRERMKRIEEGIKELGSQILKEHPVENTQLQNEKLYLYYLQNGRDMYVDQELDINRLSDYDVDHIVPQSFLKDDSIDNKVLTRSDKARGKSDNVPSEEVVKKMKNYWRQLLNAKLITQRKFDNLTKAERGGLSELDKAGFIKRQLVETRQITKHVAQILDSRMNTKYDENDKLIREVKVITLKSKLVSDFRKDFQFYKVREINNYHHAHDAYLNAVVGTALIKKYPKLESEFVYGDYKVYDVRKMIAKSEQEIGKATAKYFFYSNIMNFFKTEITLANGEIRKRPLIETNGETGEIVWDKGRDFATVRKVLSMPQVNIVKKTEVQTGGFSKESILPKRNSDKLIARKKDWDPKKYGGFDSPTVAYSVLVVAKVEKGKSKKLKSVKELLGITIMERSSFEKNPIDFLEAKGYKEVKKDLIIKLPKYSLFELENGRKRMLASAGELQKGNELALPSKYVNFLYLASHYEKLKGSPEDNEQKQLFVEQHKHYLDEIIEQISEFSKRVILADANLDKVLSAYNKHRDKPIREQAENIIHLFTLTNLGAPAAFKYFDTTIDRKRYTSTKEVLDATLIHQSITGLYETRIDLSQLGGDGGEAAAKGGSGGGGGTLQLEEEYRLFEPESTQKQEMDIWLKNFPQAWAETGGMGTAHCQAPVLIQLKATATPISIRQYPMPHEAYQGIKPHIRRMLDQGILKPCQSPWNTPLLPVKKPGTEDYRPVQDLREVNKRVEDIHPTVPNPYNLLSTLPPSHPWYTVLDLKDAFFCLRLHSESQLLFAFEWRDPEIGLSGQLTWTRLPQGFKNSPTLFNEALHSDLADFRVRYPALVLLQYVDDLLLAAATRTECLEGTKALLETLGNKGYRASAKKAQICLQEVTYLGYSLKDGQRWLTKARKEAILSIPVPKNSRQVREFLGTAGYCRLWIPGFAELAAPLYPLTRPGTLFQWGTEQQLAFEDIKKALLSSPALGLPDITKPFELFIDENSGFAKGVLVQKLGPWKRPVAYLSKKLDTVASGWPPCLRMVAAIAILVKDAGKLTLGQPLTILTSHPVEALVRQPPNKWLSNARMTHYQAMLLDAERVHFGPTVSLNPATLLPLPSGGNHHDCLQILAETHGTRPDLTDQPLPDADLTWYTDGSSFIRNGEREAGAAVTTESEVIWAAPLPPGTSAQRAELIALTQALKMAEGKKLTVYTDSRYAFATTHVHGEIYRRRGWLTSEGKEIKNKNEILALLEALFLPKRLSIIHCPGHQKGDSPQAKGNRLADDTAKKAATETHSSLTVLPAGKRTADGSEFEKRTADGSEFESPKKKAKVE

SEQ ID NO: 6939 - protein, 2176 aa, synthetic construct
MPAAKRVKLDGGDKKYSIGLDIGTNSVGWAVITDEYKVPSKKFKVLGNTDRHSIKKNLIGALLFDSGETAEATRLKRTARRRYTRRKNRICYLQEIFSNEMAKVDDSFFHRLEESFLVEEDKKHERHPIFGNIVDEVAYHEKYPTIYHLRKKLVDSTDKADLRLIYLALAHMIKFRGHFLIEGDLNPDNSDVDKLFIQLVQTYNQLFEENPINASGVDAKAILSARLSKSRRLENLIAQLPGEKKNGLFGNLIALSLGLTPNFKSNFDLAEDAKLQLSKDTYDDDLDNLLAQIGDQYADLFLAAKNLSDAILLSDILRVNTEITKAPLSASMIKRYDEHHQDLTLLKALVRQQLPEKYKEIFFDQSKNGYAGYIDGGASQEEFYKFIKPILEKMDGTEELLVKLNREDLLRKQRTFDNGSIPHQIHLGELHAILRRQEDFYPFLKDNREKIEKILTFRIPYYVGPLARGNSRFAWMTRKSEETITPWNFEEVVDKGASAQSFIERMTNFDKNLPNEKVLPKHSLLYEYFTVYNELTKVKYVTEGMRKPAFLSGEQKKAIVDLLFKTNRKVTVKQLKEDYFKKIECFDSVEISGVEDRFNASLGTYHDLLKIIKDKDFLDNEENEDILEDIVLTLTLFEDREMIEERLKTYAHLFDDKVMKQLKRRRYTGWGRLSRKLINGIRDKQSGKTILDFLKSDGFANRNFMQLIHDDSLTFKEDIQKAQVSGQGDSLHEHIANLAGSPAIKKGILQTVKVVDELVKVMGRHKPENIVIEMARENQTTQKGQKNSRERMKRIEEGIKELGSQILKEHPVENTQLQNEKLYLYYLQNGRDMYVDQELDINRLSDYDVDHIVPQSFLKDDSIDNKVLTRSDKARGKSDNVPSEEVVKKMKNYWRQLLNAKLITQRKFDNLTKAERGGLSELDKAGFIKRQLVETRQITKHVAQILDSRMNTKYDENDKLIREVKVITLKSKLVSDFRKDFQFYKVREINNYHHAHDAYLNAVVGTALIKKYPKLESEFVYGDYKVYDVRKMIAKSEQEIGKATAKYFFYSNIMNFFKTEITLANGEIRKRPLIETNGETGEIVWDKGRDFATVRKVLSMPQVNIVKKTEVQTGGFSKESILPKRNSDKLIARKKDWDPKKYGGFDSPTVAYSVLVVAKVEKGKSKKLKSVKELLGITIMERSSFEKNPIDFLEAKGYKEVKKDLIIKLPKYSLFELENGRKRMLASAGELQKGNELALPSKYVNFLYLASHYEKLKGSPEDNEQKQLFVEQHKHYLDEIIEQISEFSKRVILADANLDKVLSAYNKHRDKPIREQAENIIHLFTLTNLGAPAAFKYFDTTIDRKRYTSTKEVLDATLIHQSITGLYETRIDLSQLGGDGGEAAAKGGSGGGGGMNPLQLLQPLPAEIKGTKLLAHWNSGATITCIPESFLEDEQPIKKTLIKTIHGEKQQNVYYVTFKVKGRKVEAEVIASPYEYILLSPTDVPWLTQQPLQLTILVPLQEYQEKILSKTALPEDQKQQLKTLFVKYDNLWQHWENQVGHRKIRPHNIATGDYPPRPQKQYPINPKAKPSIQIVIDDLLKQGVLTPQNSTMNTPVYPVPKPDGRWRMVLDYREVNKTIPLTAAQNQHSAGILATIVRQKYKTTLDLANGFWAHPITPESYWLTAFTWQGKQYCWTRLPQGFLNSPALFNADVVDLLKEIPNVQVYVDDIYLSHDDPKEHVQQLEKVFQILLQAGYVVSLKKSEIGQKTVEFLGFNITKEGRGLTDTFKTKLLNITPPKDLKQLQSILGKLNFARNFIPNFAELVQPLYNLIAPAKGKYIEWSEENTKQLNMVIEALNTASNLEERLPEQRLVIKVNTSPSAGYVRYYNETGKKPIMYLNYVFSKAELKFSMLEKLLTTMHKALIKAMDLAMGQEILVYSPIVSMTKIQKTPLPERKALPIRWITWMTYLEDPRIQFHYDKTLPELKHIPDVYTSSQSPVKHPSQYEGVFYTDGSAIKSPDPTKSNNAGMGIVHATYKPEYQVLNQWSIPLGNHTAQMAEIAAVEFACKKALKIPGPVLVITDSFYVAESANKELPYWKSNGFVNNKKKPLKHISKWKSIAECLSMKPDITIQHEKGISLQIPVFILKGNALADKLATQGSYVVNAGKRTADGSEFEKRTADGSEFESPKKKAKVE

SEQ ID NO: 6940 - protein, 2094 aa, synthetic construct
MPAAKRVKLDGGDKKYSIGLDIGTNSVGWAVITDEYKVPSKKFKVLGNTDRHSIKKNLIGALLFDSGETAEATRLKRTARRRYTRRKNRICYLQEIFSNEMAKVDDSFFHRLEESFLVEEDKKHERHPIFGNIVDEVAYHEKYPTIYHLRKKLVDSTDKADLRLIYLALAHMIKFRGHFLIEGDLNPDNSDVDKLFIQLVQTYNQLFEENPINASGVDAKAILSARLSKSRRLENLIAQLPGEKKNGLFGNLIALSLGLTPNFKSNFDLAEDAKLQLSKDTYDDDLDNLLAQIGDQYADLFLAAKNLSDAILLSDILRVNTEITKAPLSASMIKRYDEHHQDLTLLKALVRQQLPEKYKEIFFDQSKNGYAGYIDGGASQEEFYKFIKPILEKMDGTEELLVKLNREDLLRKQRTFDNGSIPHQIHLGELHAILRRQEDFYPFLKDNREKIEKILTFRIPYYVGPLARGNSRFAWMTRKSEETITPWNFEEVVDKGASAQSFIERMTNFDKNLPNEKVLPKHSLLYEYFTVYNELTKVKYVTEGMRKPAFLSGEQKKAIVDLLFKTNRKVTVKQLKEDYFKKIECFDSVEISGVEDRFNASLGTYHDLLKIIKDKDFLDNEENEDILEDIVLTLTLFEDREMIEERLKTYAHLFDDKVMKQLKRRRYTGWGRLSRKLINGIRDKQSGKTILDFLKSDGFANRNFMQLIHDDSLTFKEDIQKAQVSGQGDSLHEHIANLAGSPAIKKGILQTVKVVDELVKVMGRHKPENIVIEMARENQTTQKGQKNSRERMKRIEEGIKELGSQILKEHPVENTQLQNEKLYLYYLQNGRDMYVDQELDINRLSDYDVDHIVPQSFLKDDSIDNKVLTRSDKARGKSDNVPSEEVVKKMKNYWRQLLNAKLITQRKFDNLTKAERGGLSELDKAGFIKRQLVETRQITKHVAQILDSRMNTKYDENDKLIREVKVITLKSKLVSDFRKDFQFYKVREINNYHHAHDAYLNAVVGTALIKKYPKLESEFVYGDYKVYDVRKMIAKSEQEIGKATAKYFFYSNIMNFFKTEITLANGEIRKRPLIETNGETGEIVWDKGRDFATVRKVLSMPQVNIVKKTEVQTGGFSKESILPKRNSDKLIARKKDWDPKKYGGFDSPTVAYSVLVVAKVEKGKSKKLKSVKELLGITIMERSSFEKNPIDFLEAKGYKEVKKDLIIKLPKYSLFELENGRKRMLASAGELQKGNELALPSKYVNFLYLASHYEKLKGSPEDNEQKQLFVEQHKHYLDEIIEQISEFSKRVILADANLDKVLSAYNKHRDKPIREQAENIIHLFTLTNLGAPAAFKYFDTTIDRKRYTSTKEVLDATLIHQSITGLYETRIDLSQLGGDGGEAAAKGGSGGGGGVLNLEEEYRLHEKPVPSSIDPSWLQLFPTVWAERAGMGLANQVPPVVVELRSGASPVAVRQYPMSKEAREGIRPHIQKFLDLGVLVPCRSPWNTPLLPVKKPGTNDYRPVQDLREINKRVQDIHPTVPNPYNLLSSLPPSYTWYSVLDLKDAFFCLRLHPNSQPLFAFEWKDPEKGNTGQLTWTRLPQGFKNSPTLFNEALHRDLAPFRALNPQVVLLQYVDDLLVAAPTYEDCKKGTQKLLQELSKLGYRVSAKKAQLCQREVTYLGYLLKEGKRWLTPARKATVMKIPVPTTPRQVREFLGKAGFCRLFIPGFASLAAPLYPLTKPSIPFIWTEEHQQAFDHIKKALLSAPALALPDLTKPFTLYIDERAGVARGVLTQTLGPWRRPVAYLSKKLDPVASGWPTCLKAVAAVALLLKDADKLTLGQNVTVIASHSLESIVRQPPDRWMTNARMTHYQSLLLNERVSFAPPAVLNPATLLPVESEATPVHRCSEILAEETGTRRDLEDQPLPGVPTWYTDGSSFITEGKRRAGAPIVDGKRTVWASSLPEGTSAQKAELVALTQALRLAEGKNINIYTDSRYAFATAHIHGAIYKQRGWLTSAGKDIKNKEEILALLEAIHLPRRVAIIHCPGHQRGSNPVATGNRRADEAAKQAALSTRVLAGTTKPAGKRTADGSEFEKRTADGSEFESPKKKAKVE

SEQ ID NO: 6941 - protein, 2218 aa, synthetic construct
MPAAKRVKLDGGDKKYSIGLDIGTNSVGWAVITDEYKVPSKKFKVLGNTDRHSIKKNLIGALLFDSGETAEATRLKRTARRRYTRRKNRICYLQEIFSNEMAKVDDSFFHRLEESFLVEEDKKHERHPIFGNIVDEVAYHEKYPTIYHLRKKLVDSTDKADLRLIYLALAHMIKFRGHFLIEGDLNPDNSDVDKLFIQLVQTYNQLFEENPINASGVDAKAILSARLSKSRRLENLIAQLPGEKKNGLFGNLIALSLGLTPNFKSNFDLAEDAKLQLSKDTYDDDLDNLLAQIGDQYADLFLAAKNLSDAILLSDILRVNTEITKAPLSASMIKRYDEHHQDLTLLKALVRQQLPEKYKEIFFDQSKNGYAGYIDGGASQEEFYKFIKPILEKMDGTEELLVKLNREDLLRKQRTFDNGSIPHQIHLGELHAILRRQEDFYPFLKDNREKIEKILTFRIPYYVGPLARGNSRFAWMTRKSEETITPWNFEEVVDKGASAQSFIERMTNFDKNLPNEKVLPKHSLLYEYFTVYNELTKVKYVTEGMRKPAFLSGEQKKAIVDLLFKTNRKVTVKQLKEDYFKKIECFDSVEISGVEDRFNASLGTYHDLLKIIKDKDFLDNEENEDILEDIVLTLTLFEDREMIEERLKTYAHLFDDKVMKQLKRRRYTGWGRLSRKLINGIRDKQSGKTILDFLKSDGFANRNFMQLIHDDSLTFKEDIQKAQVSGQGDSLHEHIANLAGSPAIKKGILQTVKVVDELVKVMGRHKPENIVIEMARENQTTQKGQKNSRERMKRIEEGIKELGSQILKEHPVENTQLQNEKLYLYYLQNGRDMYVDQELDINRLSDYDVDHIVPQSFLKDDSIDNKVLTRSDKARGKSDNVPSEEVVKKMKNYWRQLLNAKLITQRKFDNLTKAERGGLSELDKAGFIKRQLVETRQITKHVAQILDSRMNTKYDENDKLIREVKVITLKSKLVSDFRKDFQFYKVREINNYHHAHDAYLNAVVGTALIKKYPKLESEFVYGDYKVYDVRKMIAKSEQEIGKATAKYFFYSNIMNFFKTEITLANGEIRKRPLIETNGETGEIVWDKGRDFATVRKVLSMPQVNIVKKTEVQTGGFSKESILPKRNSDKLIARKKDWDPKKYGGFDSPTVAYSVLVVAKVEKGKSKKLKSVKELLGITIMERSSFEKNPIDFLEAKGYKEVKKDLIIKLPKYSLFELENGRKRMLASAGELQKGNELALPSKYVNFLYLASHYEKLKGSPEDNEQKQLFVEQHKHYLDEIIEQISEFSKRVILADANLDKVLSAYNKHRDKPIREQAENIIHLFTLTNLGAPAAFKYFDTTIDRKRYTSTKEVLDATLIHQSITGLYETRIDLSQLGGDGGEAAAKGGSGGGGGTLGDQGSRGSDPLPEPRVTLTVEGIPTEFLVNTGAEHSVLTKPMGKMGSKRTVVAGATGSKVYPWTTKRLLKIGQKQVTHSFLVIPECPAPLLGRDLLTKLKAQIQFSTEGPQVTWEDRPAMCLVLNLEEEYRLHEKPVPPSIDPSWLQLFPMVWAEKAGMGLANQVPPVVVELKSDASPVAVRQYPMSKEAREGIRPHIQRFLDLGILVPCQSPWNTPLLPVKKPGTNDYRPVQDLREVNKRVQDIHPTVPNPYNLLSSLPPSHTWYSVLDLKDAFFCLKLHPNSQPLFAFEWRDPEKGNTGQLTWTRLPQGFKNSPTLFDEALHRDLASFRALNPQVVMLQYVDDLLVAAPTYRDCKEGTRRLLQELSKLGYRVSAKKAQLCREEVTYLGYLLKGGKRWLTPARKATVMKIPTPTTPRQVREFLGTAGFCRLWIPGFASLAAPLYPLTREKVPFTWTEAHQEAFGRIKEALLSAPALALPDLTKPFALYVDEKEGVARGVLTQTLGPWRRPVAYLSKKLDPVASGWPTCLKAIAAVALLLKDADKLTLGQNVLVIAPHNLESIVRQPPDRWMTNARMTHYQSLLLNERVSFAPPAILNPATLLPVESDDTPIHICSEILAEETGTRPDLRDQPLPGVPAWYTDGSSFIMDGRRQAGAAIVDNKRTVWASNLPEGTSAQKAELIALTQALRLAEGKSINIYTDSRYAFATAHVHGAIYKQRGLLTSAGKDIKNKEEILALLEAIHLPKRVAIIHCPGHQRGTDPVATGNRKADEAAKQAAQSTRILTETTKNAGKRTADGSEFEKRTADGSEFESPKKKAKVE

SEQ ID NO: 6942 - protein, 2127 aa, synthetic construct
MPAAKRVKLDGGDKKYSIGLDIGTNSVGWAVITDEYKVPSKKFKVLGNTDRHSIKKNLIGALLFDSGETAEATRLKRTARRRYTRRKNRICYLQEIFSNEMAKVDDSFFHRLEESFLVEEDKKHERHPIFGNIVDEVAYHEKYPTIYHLRKKLVDSTDKADLRLIYLALAHMIKFRGHFLIEGDLNPDNSDVDKLFIQLVQTYNQLFEENPINASGVDAKAILSARLSKSRRLENLIAQLPGEKKNGLFGNLIALSLGLTPNFKSNFDLAEDAKLQLSKDTYDDDLDNLLAQIGDQYADLFLAAKNLSDAILLSDILRVNTEITKAPLSASMIKRYDEHHQDLTLLKALVRQQLPEKYKEIFFDQSKNGYAGYIDGGASQEEFYKFIKPILEKMDGTEELLVKLNREDLLRKQRTFDNGSIPHQIHLGELHAILRRQEDFYPFLKDNREKIEKILTFRIPYYVGPLARGNSRFAWMTRKSEETITPWNFEEVVDKGASAQSFIERMTNFDKNLPNEKVLPKHSLLYEYFTVYNELTKVKYVTEGMRKPAFLSGEQKKAIVDLLFKTNRKVTVKQLKEDYFKKIECFDSVEISGVEDRFNASLGTYHDLLKIIKDKDFLDNEENEDILEDIVLTLTLFEDREMIEERLKTYAHLFDDKVMKQLKRRRYTGWGRLSRKLINGIRDKQSGKTILDFLKSDGFANRNFMQLIHDDSLTFKEDIQKAQVSGQGDSLHEHIANLAGSPAIKKGILQTVKVVDELVKVMGRHKPENIVIEMARENQTTQKGQKNSRERMKRIEEGIKELGSQILKEHPVENTQLQNEKLYLYYLQNGRDMYVDQELDINRLSDYDVDHIVPQSFLKDDSIDNKVLTRSDKARGKSDNVPSEEVVKKMKNYWRQLLNAKLITQRKFDNLTKAERGGLSELDKAGFIKRQLVETRQITKHVAQILDSRMNTKYDENDKLIREVKVITLKSKLVSDFRKDFQFYKVREINNYHHAHDAYLNAVVGTALIKKYPKLESEFVYGDYKVYDVRKMIAKSEQEIGKATAKYFFYSNIMNFFKTEITLANGEIRKRPLIETNGETGEIVWDKGRDFATVRKVLSMPQVNIVKKTEVQTGGFSKESILPKRNSDKLIARKKDWDPKKYGGFDSPTVAYSVLVVAKVEKGKSKKLKSVKELLGITIMERSSFEKNPIDFLEAKGYKEVKKDLIIKLPKYSLFELENGRKRMLASAGELQKGNELALPSKYVNFLYLASHYEKLKGSPEDNEQKQLFVEQHKHYLDEIIEQISEFSKRVILADANLDKVLSAYNKHRDKPIREQAENIIHLFTLTNLGAPAAFKYFDTTIDRKRYTSTKEVLDATLIHQSITGLYETRIDLSQLGGDGGEAAAKGGSGGGGGLLGRDLLTKLKAQIQFSTEGPQVTWEDRPAMCLVLNLEEEYRLHEKPVPPSIDPSWLQLFPMVWAEKAGMGLANQVPPVVVELKSDASPVAVRQYPMSKEAREGIRPHIQRFLDLGILVPCQSPWNTPLLPVKKPGTNDYRPVQDLREVNKRVQDIHPTVPNPYNLLSSLPPSHTWYSVLDLKDAFFCLKLHPNSQPLFAFEWRDPEKGNTGQLTWTRLPQGFKNSPTLFNEALHRDLASFRALNPQVVMLQYVDDLLVAAPTYRDCKEGTRRLLQELSKLGYRVSAKKAQLCREEVTYLGYLLKGGKRWLTPARKATVMKIPTPTTPRQVREFLGTAGFCRLWIPGFASLAAPLYPLTRPKVPFTWTEAHQEAFGRIKEALLSAPALALPDLTKPFALYVDEKEGVARGVLTQTLGPWRRPVAYLSKKLDPVASGWPTCLKAIAAVALLLKDADKLTLGQNVLVIAPHNLESIVRQPPDRWMTNARMTHYQSLLLNERVSFAPPAILNPATLLPVESDDTPIHICSEILAEETGTRPDLRDQPLPGVPAWYTDGSSFIMDGRRQAGAAIVDNKRTVWASNLPEGTSAQKAELIALTQALRLAEGKSINIYTDSRYAFATAHVHGAIYKQRGWLTSAGKDIKNKEEILALLEAIHLPKRVAIIHCPGHQRGTDPVATGNRKADEAAKQAAQSTRILTETTKNAGKRTADGSEFEKRTADGSEFESPKKKAKVE

SEQ ID NO: 6943 - protein, 2127 aa, synthetic construct
MPAAKRVKLDGGDKKYSIGLDIGTNSVGWAVITDEYKVPSKKFKVLGNTDRHSIKKNLIGALLFDSGETAEATRLKRTARRRYTRRKNRICYLQEIFSNEMAKVDDSFFHRLEESFLVEEDKKHERHPIFGNIVDEVAYHEKYPTIYHLRKKLVDSTDKADLRLIYLALAHMIKFRGHFLIEGDLNPDNSDVDKLFIQLVQTYNQLFEENPINASGVDAKAILSARLSKSRRLENLIAQLPGEKKNGLFGNLIALSLGLTPNFKSNFDLAEDAKLQLSKDTYDDDLDNLLAQIGDQYADLFLAAKNLSDAILLSDILRVNTEITKAPLSASMIKRYDEHHQDLTLLKALVRQQLPEKYKEIFFDQSKNGYAGYIDGGASQEEFYKFIKPILEKMDGTEELLVKLNREDLLRKQRTFDNGSIPHQIHLGELHAILRRQEDFYPFLKDNREKIEKILTFRIPYYVGPLARGNSRFAWMTRKSEETITPWNFEEVVDKGASAQSFIERMTNFDKNLPNEKVLPKHSLLYEYFTVYNELTKVKYVTEGMRKPAFLSGEQKKAIVDLLFKTNRKVTVKQLKEDYFKKIECFDSVEISGVEDRFNASLGTYHDLLKIIKDKDFLDNEENEDILEDIVLTLTLFEDREMIEERLKTYAHLFDDKVMKQLKRRRYTGWGRLSRKLINGIRDKQSGKTILDFLKSDGFANRNFMQLIHDDSLTFKEDIQKAQVSGQGDSLHEHIANLAGSPAIKKGILQTVKVVDELVKVMGRHKPENIVIEMARENQTTQKGQKNSRERMKRIEEGIKELGSQILKEHPVENTQLQNEKLYLYYLQNGRDMYVDQELDINRLSDYDVDHIVPQSFLKDDSIDNKVLTRSDKARGKSDNVPSEEVVKKMKNYWRQLLNAKLITQRKFDNLTKAERGGLSELDKAGFIKRQLVETRQITKHVAQILDSRMNTKYDENDKLIREVKVITLKSKLVSDFRKDFQFYKVREINNYHHAHDAYLNAVVGTALIKKYPKLESEFVYGDYKVYDVRKMIAKSEQEIGKATAKYFFYSNIMNFFKTEITLANGEIRKRPLIETNGETGEIVWDKGRDFATVRKVLSMPQVNIVKKTEVQTGGFSKESILPKRNSDKLIARKKDWDPKKYGGFDSPTVAYSVLVVAKVEKGKSKKLKSVKELLGITIMERSSFEKNPIDFLEAKGYKEVKKDLIIKLPKYSLFELENGRKRMLASAGELQKGNELALPSKYVNFLYLASHYEKLKGSPEDNEQKQLFVEQHKHYLDEIIEQISEFSKRVILADANLDKVLSAYNKHRDKPIREQAENIIHLFTLTNLGAPAAFKYFDTTIDRKRYTSTKEVLDATLIHQSITGLYETRIDLSQLGGDGGEAAAKGGSGGGGGLLGRDLLTKLKAQIQFSTEGPQVTWEDRPAMCLVLNLEEEYRLHEKPVPPSIDPSWLQLFPMVWAEKAGMGLANQVPPVVVELKSDASPVAVRQYPMSKEAREGIRPHIQRFLDLGILVPCQSPWNTPLLPVKKPGTNDYRPVQDLREVNKRVQDIHPTVPNPYNLLSSLPPSHTWYSVLDLKDAFFCLKLHPNSQPLFAFEWRDPEKGNTGQLTWTRLPQGFKNSPTLFNEALHRDLASFRALNPQVVMLQYVDDLLVAAPTYRDCKEGTRRLLQELSKLGYRVSAKKAQLCREEVTYLGYLLKGGKRWLTPARKATVMKIPTPTTPRQVREFLGKAGFCRLFIPGFASLAAPLYPLTRPKVPFTWTEAHQEAFGRIKEALLSAPALALPDLTKPFALYVDEKEGVARGVLTQTLGPWRRPVAYLSKKLDPVASGWPTCLKAIAAVALLLKDADKLTLGQNVLVIAPHNLESIVRQPPDRWMTNARMTHYQSLLLNERVSFAPPAILNPATLLPVESDDTPIHICSEILAEETGTRPDLRDQPLPGVPAWYTDGSSFIMDGRRQAGAAIVDNKRTVWASNLPEGTSAQKAELIALTQALRLAEGKSINIYTDSRYAFATAHVHGAIYKQRGWLTSAGKDIKNKEEILALLEAIHLPKRVAIIHCPGHQRGTDPVATGNRKADEAAKQAAQSTRILTETTKNAGKRTADGSEFEKRTADGSEFESPKKKAKVE

SEQ ID NO: 6944 - protein, 2218 aa, synthetic construct
MPAAKRVKLDGGDKKYSIGLDIGTNSVGWAVITDEYKVPSKKFKVLGNTDRHSIKKNLIGALLFDSGETAEATRLKRTARRRYTRRKNRICYLQEIFSNEMAKVDDSFFHRLEESFLVEEDKKHERHPIFGNIVDEVAYHEKYPTIYHLRKKLVDSTDKADLRLIYLALAHMIKFRGHFLIEGDLNPDNSDVDKLFIQLVQTYNQLFEENPINASGVDAKAILSARLSKSRRLENLIAQLPGEKKNGLFGNLIALSLGLTPNFKSNFDLAEDAKLQLSKDTYDDDLDNLLAQIGDQYADLFLAAKNLSDAILLSDILRVNTEITKAPLSASMIKRYDEHHQDLTLLKALVRQQLPEKYKEIFFDQSKNGYAGYIDGGASQEEFYKFIKPILEKMDGTEELLVKLNREDLLRKQRTFDNGSIPHQIHLGELHAILRRQEDFYPFLKDNREKIEKILTFRIPYYVGPLARGNSRFAWMTRKSEETITPWNFEEVVDKGASAQSFIERMTNFDKNLPNEKVLPKHSLLYEYFTVYNELTKVKYVTEGMRKPAFLSGEQKKAIVDLLFKTNRKVTVKQLKEDYFKKIECFDSVEISGVEDRFNASLGTYHDLLKIIKDKDFLDNEENEDILEDIVLTLTLFEDREMIEERLKTYAHLFDDKVMKQLKRRRYTGWGRLSRKLINGIRDKQSGKTILDFLKSDGFANRNFMQLIHDDSLTFKEDIQKAQVSGQGDSLHEHIANLAGSPAIKKGILQTVKVVDELVKVMGRHKPENIVIEMARENQTTQKGQKNSRERMKRIEEGIKELGSQILKEHPVENTQLQNEKLYLYYLQNGRDMYVDQELDINRLSDYDVDHIVPQSFLKDDSIDNKVLTRSDKARGKSDNVPSEEVVKKMKNYWRQLLNAKLITQRKFDNLTKAERGGLSELDKAGFIKRQLVETRQITKHVAQILDSRMNTKYDENDKLIREVKVITLKSKLVSDFRKDFQFYKVREINNYHHAHDAYLNAVVGTALIKKYPKLESEFVYGDYKVYDVRKMIAKSEQEIGKATAKYFFYSNIMNFFKTEITLANGEIRKRPLIETNGETGEIVWDKGRDFATVRKVLSMPQVNIVKKTEVQTGGFSKESILPKRNSDKLIARKKDWDPKKYGGFDSPTVAYSVLVVAKVEKGKSKKLKSVKELLGITIMERSSFEKNPIDFLEAKGYKEVKKDLIIKLPKYSLFELENGRKRMLASAGELQKGNELALPSKYVNFLYLASHYEKLKGSPEDNEQKQLFVEQHKHYLDEIIEQISEFSKRVILADANLDKVLSAYNKHRDKPIREQAENIIHLFTLTNLGAPAAFKYFDTTIDRKRYTSTKEVLDATLIHQSITGLYETRIDLSQLGGDGGEAAAKGGSGGGGGTLGDQGSRGSDPLPEPRVTLTVEGIPTEFLVNTGAEHSVLTKPMGKMGSKRTVVAGATGSKVYPWTTKRLLKIGQKQVTHSFLVIPECPAPLLGRDLLTKLKAQIQFSTEGPQVTWEDRPAMCLVLNLEEEYRLHEKPVPPSIDPSWLQLFPMVWAEKAGMGLANQVPPVVVELKSDASPVAVRQYPMSKEAREGIRPHIQRFLDLGILVPCQSPWNTPLLPVKKPGTNDYRPVQDLREVNKRVQDIHPTVPNPYNLLSSLPPSHTWYSVLDLKDAFFCLKLHPNSQPLFAFEWRDPEKGNTGQLTWTRLPQGFKNSPTLFNEALHRDLASFRALNPQVVMLQYVDDLLVAAPTYRDCKEGTRRLLQELSKLGYRVSAKKAQLCREEVTYLGYLLKGGKRWLTPARKATVMKIPTPTTPRQVREFLGTAGFCRLWIPGFASLAAPLYPLTRPKVPFTWTEAHQEAFGRIKEALLSAPALALPDLTKPFALYVDEKEGVARGVLTQTLGPWRRPVAYLSKKLDPVASGWPTCLKAIAAVALLLKDADKLTLGQNVLVIAPHNLESIVRQPPDRWMTNARMTHYQSLLLNERVSFAPPAILNPATLLPVESDDTPIHICSEILAEETGTRPDLRDQPLPGVPAWYTDGSSFIMDGRRQAGAAIVDNKRTVWASNLPEGTSAQKAELIALTQALRLAEGKSINIYTDSRYAFATAHVHGAIYKQRGWLTSAGKDIKNKEEILALLEAIHLPKRVAIIHCPGHQRGTDPVATGNRKADEAAKQAAQSTRILTETTKNAGKRTADGSEFEKRTADGSEFESPKKKAKVE

SEQ ID NO: 6945 - protein, 2218 aa, synthetic construct
MPAAKRVKLDGGDKKYSIGLDIGTNSVGWAVITDEYKVPSKKFKVLGNTDRHSIKKNLIGALLFDSGETAEATRLKRTARRRYTRRKNRICYLQEIFSNEMAKVDDSFFHRLEESFLVEEDKKHERHPIFGNIVDEVAYHEKYPTIYHLRKKLVDSTDKADLRLIYLALAHMIKFRGHFLIEGDLNPDNSDVDKLFIQLVQTYNQLFEENPINASGVDAKAILSARLSKSRRLENLIAQLPGEKKNGLFGNLIALSLGLTPNFKSNFDLAEDAKLQLSKDTYDDDLDNLLAQIGDQYADLFLAAKNLSDAILLSDILRVNTEITKAPLSASMIKRYDEHHQDLTLLKALVRQQLPEKYKEIFFDQSKNGYAGYIDGGASQEEFYKFIKPILEKMDGTEELLVKLNREDLLRKQRTFDNGSIPHQIHLGELHAILRRQEDFYPFLKDNREKIEKILTFRIPYYVGPLARGNSRFAWMTRKSEETITPWNFEEVVDKGASAQSFIERMTNFDKNLPNEKVLPKHSLLYEYFTVYNELTKVKYVTEGMRKPAFLSGEQKKAIVDLLFKTNRKVTVKQLKEDYFKKIECFDSVEISGVEDRFNASLGTYHDLLKIIKDKDFLDNEENEDILEDIVLTLTLFEDREMIEERLKTYAHLFDDKVMKQLKRRRYTGWGRLSRKLINGIRDKQSGKTILDFLKSDGFANRNFMQLIHDDSLTFKEDIQKAQVSGQGDSLHEHIANLAGSPAIKKGILQTVKVVDELVKVMGRHKPENIVIEMARENQTTQKGQKNSRERMKRIEEGIKELGSQILKEHPVENTQLQNEKLYLYYLQNGRDMYVDQELDINRLSDYDVDHIVPQSFLKDDSIDNKVLTRSDKARGKSDNVPSEEVVKKMKNYWRQLLNAKLITQRKFDNLTKAERGGLSELDKAGFIKRQLVETRQITKHVAQILDSRMNTKYDENDKLIREVKVITLKSKLVSDFRKDFQFYKVREINNYHHAHDAYLNAVVGTALIKKYPKLESEFVYGDYKVYDVRKMIAKSEQEIGKATAKYFFYSNIMNFFKTEITLANGEIRKRPLIETNGETGEIVWDKGRDFATVRKVLSMPQVNIVKKTEVQTGGFSKESILPKRNSDKLIARKKDWDPKKYGGFDSPTVAYSVLVVAKVEKGKSKKLKSVKELLGITIMERSSFEKNPIDFLEAKGYKEVKKDLIIKLPKYSLFELENGRKRMLASAGELQKGNELALPSKYVNFLYLASHYEKLKGSPEDNEQKQLFVEQHKHYLDEIIEQISEFSKRVILADANLDKVLSAYNKHRDKPIREQAENIIHLFTLTNLGAPAAFKYFDTTIDRKRYTSTKEVLDATLIHQSITGLYETRIDLSQLGGDGGEAAAKGGSGGGGGTLGDQGSRGSDPLPEPRVTLTVEGIPTEFLVNTGAEHSVLTKPMGKMGSKRTVVAGATGSKVYPWTTKRLLKIGQKQVTHSFLVIPECPAPLLGRDLLTKLKAQIQFSTEGPQVTWEDRPAMCLVLNLEEEYRLHEKPVPPSIDPSWLQLFPMVWAEKAGMGLANQVPPVVVELKSDASPVAVRQYPMSKEAREGIRPHIQRFLDLGILVPCQSPWNTPLLPVKKPGTNDYRPVQDLREVNKRVQDIHPTVPNPYNLLSSLPPSHTWYSVLDLKDAFFCLKLHPNSQPLFAFEWRDPEKGNTGQLTWTRLPQGFKNSPTLFNEALHRDLASFRALNPQVVMLQYVDDLLVAAPTYRDCKEGTRRLLQELSKLGYRVSAKKAQLCREEVTYLGYLLKGGKRWLTPARKATVMKIPTPTTPRQVREFLGKAGFCRLFIPGFASLAAPLYPLTRPKVPFTWTEAHQEAFGRIKEALLSAPALALPDLTKPFALYVDEKEGVARGVLTQTLGPWRRPVAYLSKKLDPVASGWPTCLKAIAAVALLLKDADKLTLGQNVLVIAPHNLESIVRQPPDRWMTNARMTHYQSLLLNERVSFAPPAILNPATLLPVESDDTPIHICSEILAEETGTRPDLRDQPLPGVPAWYTDGSSFIMDGRRQAGAAIVDNKRTVWASNLPEGTSAQKAELIALTQALRLAEGKSINIYTDSRYAFATAHVHGAIYKQRGWLTSAGKDIKNKEEILALLEAIHLPKRVAIIHCPGHQRGTDPVATGNRKADEAAKQAAQSTRILTETTKNAGKRTADGSEFEKRTADGSEFESPKKKAKVE

SEQ ID NO: 6946 - protein, 2096 aa, synthetic construct
MPAAKRVKLDGGDKKYSIGLDIGTNSVGWAVITDEYKVPSKKFKVLGNTDRHSIKKNLIGALLFDSGETAEATRLKRTARRRYTRRKNRICYLQEIFSNEMAKVDDSFFHRLEESFLVEEDKKHERHPIFGNIVDEVAYHEKYPTIYHLRKKLVDSTDKADLRLIYLALAHMIKFRGHFLIEGDLNPDNSDVDKLFIQLVQTYNQLFEENPINASGVDAKAILSARLSKSRRLENLIAQLPGEKKNGLFGNLIALSLGLTPNFKSNFDLAEDAKLQLSKDTYDDDLDNLLAQIGDQYADLFLAAKNLSDAILLSDILRVNTEITKAPLSASMIKRYDEHHQDLTLLKALVRQQLPEKYKEIFFDQSKNGYAGYIDGGASQEEFYKFIKPILEKMDGTEELLVKLNREDLLRKQRTFDNGSIPHQIHLGELHAILRRQEDFYPFLKDNREKIEKILTFRIPYYVGPLARGNSRFAWMTRKSEETITPWNFEEVVDKGASAQSFIERMTNFDKNLPNEKVLPKHSLLYEYFTVYNELTKVKYVTEGMRKPAFLSGEQKKAIVDLLFKTNRKVTVKQLKEDYFKKIECFDSVEISGVEDRFNASLGTYHDLLKIIKDKDFLDNEENEDILEDIVLTLTLFEDREMIEERLKTYAHLFDDKVMKQLKRRRYTGWGRLSRKLINGIRDKQSGKTILDFLKSDGFANRNFMQLIHDDSLTFKEDIQKAQVSGQGDSLHEHIANLAGSPAIKKGILQTVKVVDELVKVMGRHKPENIVIEMARENQTTQKGQKNSRERMKRIEEGIKELGSQILKEHPVENTQLQNEKLYLYYLQNGRDMYVDQELDINRLSDYDVDHIVPQSFLKDDSIDNKVLTRSDKARGKSDNVPSEEVVKKMKNYWRQLLNAKLITQRKFDNLTKAERGGLSELDKAGFIKRQLVETRQITKHVAQILDSRMNTKYDENDKLIREVKVITLKSKLVSDFRKDFQFYKVREINNYHHAHDAYLNAVVGTALIKKYPKLESEFVYGDYKVYDVRKMIAKSEQEIGKATAKYFFYSNIMNFFKTEITLANGEIRKRPLIETNGETGEIVWDKGRDFATVRKVLSMPQVNIVKKTEVQTGGFSKESILPKRNSDKLIARKKDWDPKKYGGFDSPTVAYSVLVVAKVEKGKSKKLKSVKELLGITIMERSSFEKNPIDFLEAKGYKEVKKDLIIKLPKYSLFELENGRKRMLASAGELQKGNELALPSKYVNFLYLASHYEKLKGSPEDNEQKQLFVEQHKHYLDEIIEQISEFSKRVILADANLDKVLSAYNKHRDKPIREQAENIIHLFTLTNLGAPAAFKYFDTTIDRKRYTSTKEVLDATLIHQSITGLYETRIDLSQLGGDGGEAAAKGGSGGGGGTLNLEDEYRLYETSAEPEVSPGSTWLSDFPQAWAETGGMGLAVRQAPLIIPLKATSTPVSIKQYPMSQEAKLGIKPHIQRLLDQGILVPCQSPWNTPLLPVKKPGTNDYRPVQDLREVNKRVEDIHPTVPNPYNLLSGLPPSHRWYTVLDLKDAFFCLRLHPTSQPLFAFEWRDPGMGISGQLTWTRLPQGFKNSPTLFNEALHRDLADFRIQHPDLILLQYVDDILLAATSELDCQQGTRALLLTLGNLGYRASAKKAQLCQKQVKYLGYLLKEGQRWLTEARKETVMGQPTPKTPRQLREFLGTAGFCRLWIPGFAEMAAPLYPLTKPGTLFNWGPDQQKAYQEIKQALLTAPALGLPDLTKPFELFVDEKQGYAKGVLTQKLGPWRRPVAYLSKKLDPVAAGWPPCLRMVAAIAVLRKDAGKLTMGQPLVILAPHAVEALVKQPPDRWLSNARMTHYQAMLLDTDRVQFGPVVALNPATLLPLPEEGAPHDCLEILAETHGTRPDLTDQPIPDADHTWYTDGSSFLQEGQRKAGAAVTTETEVIWARALPAGTSAQRAELIALTQALKMAEGKRLNVYTDSRYAFATAHIHGEIYRRRGWLTSEGREIKNKSEILALLKALFLPKRLSIIHCLGHQKGDSAEARGNRLADQAAREAAIKTPPDTSTLLAGKRTADGSEFEKRTADGSEFESPKKKAKVE

SEQ ID NO: 6947 - protein, 2096 aa, synthetic construct
MPAAKRVKLDGGDKKYSIGLDIGTNSVGWAVITDEYKVPSKKFKVLGNTDRHSIKKNLIGALLFDSGETAEATRLKRTARRRYTRRKNRICYLQEIFSNEMAKVDDSFFHRLEESFLVEEDKKHERHPIFGNIVDEVAYHEKYPTIYHLRKKLVDSTDKADLRLIYLALAHMIKFRGHFLIEGDLNPDNSDVDKLFIQLVQTYNQLFEENPINASGVDAKAILSARLSKSRRLENLIAQLPGEKKNGLFGNLIALSLGLTPNFKSNFDLAEDAKLQLSKDTYDDDLDNLLAQIGDQYADLFLAAKNLSDAILLSDILRVNTEITKAPLSASMIKRYDEHHQDLTLLKALVRQQLPEKYKEIFFDQSKNGYAGYIDGGASQEEFYKFIKPILEKMDGTEELLVKLNREDLLRKQRTFDNGSIPHQIHLGELHAILRRQEDFYPFLKDNREKIEKILTFRIPYYVGPLARGNSRFAWMTRKSEETITPWNFEEVVDKGASAQSFIERMTNFDKNLPNEKVLPKHSLLYEYFTVYNELTKVKYVTEGMRKPAFLSGEQKKAIVDLLFKTNRKVTVKQLKEDYFKKIECFDSVEISGVEDRFNASLGTYHDLLKIIKDKDFLDNEENEDILEDIVLTLTLFEDREMIEERLKTYAHLFDDKVMKQLKRRRYTGWGRLSRKLINGIRDKQSGKTILDFLKSDGFANRNFMQLIHDDSLTFKEDIQKAQVSGQGDSLHEHIANLAGSPAIKKGILQTVKVVDELVKVMGRHKPENIVIEMARENQTTQKGQKNSRERMKRIEEGIKELGSQILKEHPVENTQLQNEKLYLYYLQNGRDMYVDQELDINRLSDYDVDHIVPQSFLKDDSIDNKVLTRSDKARGKSDNVPSEEVVKKMKNYWRQLLNAKLITQRKFDNLTKAERGGLSELDKAGFIKRQLVETRQITKHVAQILDSRMNTKYDENDKLIREVKVITLKSKLVSDFRKDFQFYKVREINNYHHAHDAYLNAVVGTALIKKYPKLESEFVYGDYKVYDVRKMIAKSEQEIGKATAKYFFYSNIMNFFKTEITLANGEIRKRPLIETNGETGEIVWDKGRDFATVRKVLSMPQVNIVKKTEVQTGGFSKESILPKRNSDKLIARKKDWDPKKYGGFDSPTVAYSVLVVAKVEKGKSKKLKSVKELLGITIMERSSFEKNPIDFLEAKGYKEVKKDLIIKLPKYSLFELENGRKRMLASAGELQKGNELALPSKYVNFLYLASHYEKLKGSPEDNEQKQLFVEQHKHYLDEIIEQISEFSKRVILADANLDKVLSAYNKHRDKPIREQAENIIHLFTLTNLGAPAAFKYFDTTIDRKRYTSTKEVLDATLIHQSITGLYETRIDLSQLGGDGGEAAAKGGSGGGGGLGIEDEYRLHETSTEPDVSLGSTWLSDFPQAWAETGGMGLAVRQAPLIIPLKATSTPVSIQQYPMSHEARLGIKPHIQRLLDQGILVPCQSPWNTPLLPVKKPGTNDYRPVQDLREVNKRVEDIHPTVPNPYNLLSGLPPSHQWYTVLDLKDAFFCLRLHPTSQPLFAFEWRDPGMGISGQLTWTRLPQGFKNSPTLFNEALHRDLADFRIQHPDLILLQYVDDILLAATSELDCQQGTRALLQTLGDLGYRASAKKAQICQKQVKYLGYLLREGQRWLTEARKETVMGQPVPKTPRQLREFLGKAGFCRLFIPGFAEMAAPLYPLTKPGTLFSWGPDQQKAYQEIKQALLTAPALGLPDLTKPFELFVDEKQGYAKGVLTQKLGPWRRPVAYLSKKLDPVAAGWPPCLRMVAAIAVLTKDAGKLTMGQPLVILAPHAVEALVKQPPDRWLSNARMTHYQAMLLDTDRVQFGPVVALNPATLLPLPEEGAPHDCLEILAETHGTRPDLTDQPIPDADHTWYTDGSSFLQEGQRKAGAAVTTETEVIWAGALPAGTSAQRAELIALTQALKMAEGKRLNVYTDSRYAFATAHIHGEIYRRRGWLTSEGREIKNKSEILALLKALFLPKRLSIIHCLGHQKGDSAEARGNRLADQAAREAAIKTPPDTSTLLIAGKRTADGSEFEKRTADGSEFESPKKKAKVE

SEQ ID NO: 6948 - protein, 2096 aa, synthetic construct; identical to SEQ ID NO: 6947

SEQ ID NO: 6949 - protein, 2096 aa, synthetic construct
MPAAKRVKLDGGDKKYSIGLDIGTNSVGWAVITDEYKVPSKKFKVLGNTDRHSIKKNLIGALLFDSGETAEATRLKRTARRRYTRRKNRICYLQEIFSNEMAKVDDSFFHRLEESFLVEEDKKHERHPIFGNIVDEVAYHEKYPTIYHLRKKLVDSTDKADLRLIYLALAHMIKFRGHFLIEGDLNPDNSDVDKLFIQLVQTYNQLFEENPINASGVDAKAILSARLSKSRRLENLIAQLPGEKKNGLFGNLIALSLGLTPNFKSNFDLAEDAKLQLSKDTYDDDLDNLLAQIGDQYADLFLAAKNLSDAILLSDILRVNTEITKAPLSASMIKRYDEHHQDLTLLKALVRQQLPEKYKEIFFDQSKNGYAGYIDGGASQEEFYKFIKPILEKMDGTEELLVKLNREDLLRKQRTFDNGSIPHQIHLGELHAILRRQEDFYPFLKDNREKIEKILTFRIPYYVGPLARGNSRFAWMTRKSEETITPWNFEEVVDKGASAQSFIERMTNFDKNLPNEKVLPKHSLLYEYFTVYNELTKVKYVTEGMRKPAFLSGEQKKAIVDLLFKTNRKVTVKQLKEDYFKKIECFDSVEISGVEDRFNASLGTYHDLLKIIKDKDFLDNEENEDILEDIVLTLTLFEDREMIEERLKTYAHLFDDKVMKQLKRRRYTGWGRLSRKLINGIRDKQSGKTILDFLKSDGFANRNFMQLIHDDSLTFKEDIQKAQVSGQGDSLHEHIANLAGSPAIKKGILQTVKVVDELVKVMGRHKPENIVIEMARENQTTQKGQKNSRERMKRIEEGIKELGSQILKEHPVENTQLQNEKLYLYYLQNGRDMYVDQELDINRLSDYDVDHIVPQSFLKDDSIDNKVLTRSDKARGKSDNVPSEEVVKKMKNYWRQLLNAKLITQRKFDNLTKAERGGLSELDKAGFIKRQLVETRQITKHVAQILDSRMNTKYDENDKLIREVKVITLKSKLVSDFRKDFQFYKVREINNYHHAHDAYLNAVVGTALIKKYPKLESEFVYGDYKVYDVRKMIAKSEQEIGKATAKYFFYSNIMNFFKTEITLANGEIRKRPLIETNGETGEIVWDKGRDFATVRKVLSMPQVNIVKKTEVQTGGFSKESILPKRNSDKLIARKKDWDPKKYGGFDSPTVAYSVLVVAKVEKGKSKKLKSVKELLGITIMERSSFEKNPIDFLEAKGYKEVKKDLIIKLPKYSLFELENGRKRMLASAGELQKGNELALPSKYVNFLYLASHYEKLKGSPEDNEQKQLFVEQHKHYLDEIIEQISEFSKRVILADANLDKVLSAYNKHRDKPIREQAENIIHLFTLTNLGAPAAFKYFDTTIDRKRYTSTKEVLDATLIHQSITGLYETRIDLSQLGGDGGEAAAKGGSGGGGGTLNIEDEYRLHETSKEPDVSLGSTWLSDFPQAWAETGGMGLAVRQAPLIIPLKATSTPVSIKQYPMSQEARLGIKPHIQRLLDQGILVPCQSPWNTPLLPVKKPGTNDYRPVQDLREVNKRVEDIHPTVPNPYNLLSGLPPSHQWYTVLDLKDAFFCLRLHPTSQPLFAFEWRDPEMGISGQLTWTRLPQGFKNSPTLFNEALHRDLAGFRIQHPDLILLQYVDDLLLAATSELDCQQGTRALLQTLGDLGYRASAKKAQICQKQVKYLGYLLKEGQRWLTEARKETVMGQPIPKTPRQLREFLGTAGFCRLWIPGFAEMAAPLYPLTKPGTLFNWGPDQQKAFQEIKQALLTAPALGLPDLTKPFELFVDEKQGYAKGVLTQKLGPWRRPVAYLSKKLDPVAAGWPPCLRMVAAIAVLTKDAGKLTMGQPLVILAPHAVEALVKQPPDRWLSNARMTHYQALLLDTDRVQFGPVVALNPATLLPLPEEGLQHDCLDILAEAHGTRSDLMDQPLPDADHTWYTDGSSFLQEGQRKAGAAVTTETEVIWARALPAGTSAQRAELIALTQALKMAEGKKLNVYTDSRYAFATAHIHGEIYRRRGWLTSEGKEIKNKDEILALLKALFLPKRLSIIHCPGHQKGNSAEARGNRMADQAAREVATRETPETSTLLAGKRTADGSEFEKRTADGSEFESPKKKAKVE

SEQ ID NO: 6950 - protein, 2090 aa, synthetic construct
MPAAKRVKLDGGDKKYSIGLDIGTNSVGWAVITDEYKVPSKKFKVLGNTDRHSIKKNLIGALLFDSGETAEATRLKRTARRRYTRRKNRICYLQEIFSNEMAKVDDSFFHRLEESFLVEEDKKHERHPIFGNIVDEVAYHEKYPTIYHLRKKLVDSTDKADLRLIYLALAHMIKFRGHFLIEGDLNPDNSDVDKLFIQLVQTYNQLFEENPINASGVDAKAILSARLSKSRRLENLIAQLPGEKKNGLFGNLIALSLGLTPNFKSNFDLAEDAKLQLSKDTYDDDLDNLLAQIGDQYADLFLAAKNLSDAILLSDILRVNTEITKAPLSASMIKRYDEHHQDLTLLKALVRQQLPEKYKEIFFDQSKNGYAGYIDGGASQEEFYKFIKPILEKMDGTEELLVKLNREDLLRKQRTFDNGSIPHQIHLGELHAILRRQEDFYPFLKDNREKIEKILTFRIPYYVGPLARGNSRFAWMTRKSEETITPWNFEEVVDKGASAQSFIERMTNFDKNLPNEKVLPKHSLLYEYFTVYNELTKVKYVTEGMRKPAFLSGEQKKAIVDLLFKTNRKVTVKQLKEDYFKKIECFDSVEISGVEDRFNASLGTYHDLLKIIKDKDFLDNEENEDILEDIVLTLTLFEDREMIEERLKTYAHLFDDKVMKQLKRRRYTGWGRLSRKLINGIRDKQSGKTILDFLKSDGFANRNFMQLIHDDSLTFKEDIQKAQVSGQGDSLHEHIANLAGSPAIKKGILQTVKVVDELVKVMGRHKPENIVIEMARENQTTQKGQKNSRERMKRIEEGIKELGSQILKEHPVENTQLQNEKLYLYYLQNGRDMYVDQELDINRLSDYDVDHIVPQSFLKDDSIDNKVLTRSDKARGKSDNVPSEEVVKKMKNYWRQLLNAKLITQRKFDNLTKAERGGLSELDKAGFIKRQLVETRQITKHVAQILDSRMNTKYDENDKLIREVKVITLKSKLVSDFRKDFQFYKVREINNYHHAHDAYLNAVVGTALIKKYPKLESEFVYGDYKVYDVRKMIAKSEQEIGKATAKYFFYSNIMNFFKTEITLANGEIRKRPLIETNGETGEIVWDKGRDFATVRKVLSMPQVNIVKKTEVQTGGFSKESILPKRNSDKLIARKKDWDPKKYGGFDSPTVAYSVLVVAKVEKGKSKKLKSVKELLGITIMERSSFEKNPIDFLEAKGYKEVKKDLIIKLPKYSLFELENGRKRMLASAGELQKGNELALPSKYVNFLYLASHYEKLKGSPEDNEQKQLFVEQHKHYLDEIIEQISEFSKRVILADANLDKVLSAYNKHRDKPIREQAENIIHLFTLTNLGAPAAFKYFDTTIDRKRYTSTKEVLDATLIHQSITGLYETRIDLSQLGGDGGEAAAKGGSGGGGGTLQLDDEYRLYSPLVKPDQNIQFWLEQFPQAWAETAGMGLAKQVPPQVIQLKASATPVSVRQYPLSKEAQEGIRPHVQRLIQQGILVPVQSPWNTPLLPVRKPGTNDYRPVQDLREVNKRVQDIHPTVPNPYNLLCALPPQRSWYTVLDLKDAFFCLRLHPTSQPLFAFEWRDPGTGRTGQLTWTRLPQGFKNSPTIFDEALHRDLANFRIQHPQVTLLQYVDDLLLAGATKQDCLEGTKALLLELSDLGYRASAKKAQICRREVTYLGYSLRDGQRWLTEARKKTVVQIPAPTTAKQVREFLGTAGFCRLWIPGFATLAAPLYPLTKEKGEFSWAPEHQKAFDAIKKALLSAPALALPDVTKPFTLYVDERKGVARGVLTQTLGPWRRPVAYLSKKLDPVASGWPVCLKAIAAVAILVKDADKLTLGQNITVIAPHALENIVRQPPDRWMTNARMTHYQSLLLTERVTFAPPAALNPATLLPEETDEPVTHDCHQLLIEETGVRKDLTDIPLTGEVLTWFTDGSSYVVEGKRMAGAAVVDGTRTIWASSLPEGTSAQKAELMALTQALRLAEGKSINIYTDSRYAFATAHVHGAIYKQRGLLTSAGREIKNKEEILSLLEALHLPKRLAIIHCPGHQKAKDPISRGNQMADRVAKQAAQGVNLLAGKRTADGSEFEKRTADGSEFESPKKKAKVE

SEQ ID NO: 6951 - protein, 2087 aa, synthetic construct
MPAAKRVKLDGGDKKYSIGLDIGTNSVGWAVITDEYKVPSKKFKVLGNTDRHSIKKNLIGALLFDSGETAEATRLKRTARRRYTRRKNRICYLQEIFSNEMAKVDDSFFHRLEESFLVEEDKKHERHPIFGNIVDEVAYHEKYPTIYHLRKKLVDSTDKADLRLIYLALAHMIKFRGHFLIEGDLNPDNSDVDKLFIQLVQTYNQLFEENPINASGVDAKAILSARLSKSRRLENLIAQLPGEKKNGLFGNLIALSLGLTPNFKSNFDLAEDAKLQLSKDTYDDDLDNLLAQIGDQYADLFLAAKNLSDAILLSDILRVNTEITKAPLSASMIKRYDEHHQDLTLLKALVRQQLPEKYKEIFFDQSKNGYAGYIDGGASQEEFYKFIKPILEKMDGTEELLVKLNREDLLRKQRTFDNGSIPHQIHLGELHAILRRQEDFYPFLKDNREKIEKILTFRIPYYVGPLARGNSRFAWMTRKSEETITPWNFEEVVDKGASAQSFIERMTNFDKNLPNEKVLPKHSLLYEYFTVYNELTKVKYVTEGMRKPAFLSGEQKKAIVDLLFKTNRKVTVKQLKEDYFKKIECFDSVEISGVEDRFNASLGTYHDLLKIIKDKDFLDNEENEDILEDIVLTLTLFEDREMIEERLKTYAHLFDDKVMKQLKRRRYTGWGRLSRKLINGIRDKQSGKTILDFLKSDGFANRNFMQLIHDDSLTFKEDIQKAQVSGQGDSLHEHIANLAGSPAIKKGILQTVKVVDELVKVMGRHKPENIVIEMARENQTTQKGQKNSRERMKRIEEGIKELGSQILKEHPVENTQLQNEKLYLYYLQNGRDMYVDQELDINRLSDYDVDHIVPQSFLKDDSIDNKVLTRSDKARGKSDNVPSEEVVKKMKNYWRQLLNAKLITQRKFDNLTKAERGGLSELDKAGFIKRQLVETRQITKHVAQILDSRMNTKYDENDKLIREVKVITLKSKLVSDFRKDFQFYKVREINNYHHAHDAYLNAVVGTALIKKYPKLESEFVYGDYKVYDVRKMIAKSEQEIGKATAKYFFYSNIMNFFKTEITLANGEIRKRPLIETNGETGEIVWDKGRDFATVRKVLSMPQVNIVKKTEVQTGGFSKESILPKRNSDKLIARKKDWDPKKYGGFDSPTVAYSVLVVAKVEKGKSKKLKSVKELLGITIMERSSFEKNPIDFLEAKGYKEVKKDLIIKLPKYSLFELENGRKRMLASAGELQKGNELALPSKYVNFLYLASHYEKLKGSPEDNEQKQLFVEQHKHYLDEIIEQISEFSKRVILADANLDKVLSAYNKHRDKPIREQAENIIHLFTLTNLGAPAAFKYFDTTIDRKRYTSTKEVLDATLIHQSITGLYETRIDLSQLGGDGGEAAAKGGSGGGGGIPWLMKKPLQLTTLVPLQEYEERLLKQTMLTGSYKEKLQSLFLKYDALWQHWENQVGHRRIKPHHIATGTVNPRPQKQYPINPKAKASIQTVINDLLKQGVLIQQNSIMNTPVYPVPKPDGKWRMVLDYREVNKTIPLIAAQNQHSAGILSSIFRGKYKTTLDLSNGFWAHSITPESYWLTAFTWLGQQYCWTRLPQGFLNSPALFTADVVDLLKEVPNVQVYVDDIYISHDDPREHLEQLEKVFSLLLNAGYVVSLKKSEIAQHEVEFLGFNITKEGRGLTETFKQKLLNITPPRDLKQLQSILGLLNFARNFIPNFSELVKPLYNIIATANGKYITWTTDNSQQLQNIISMLNSAENLEERNPEVRLIMKVNTSPSAGYIRFYNEFAKRPIMYLNYVYTKAEVKFTNTEKLLTTIHKGLIKALDLGMGQEILVYSPIVSMTKIQKTPLPERKALPIRWITWMSYLEDPRIQFHYDKTLPELQQVPTVTDDIIAKIKHPSEFSMVFYTDGSAIKHPNVNKSHNAGMGIAQVQFKPEFTVINTWSIPLGDHTAQLAEVAAVEFACKKALKIDGPVLIVTDSFYVAESVNKELPYWQSNGFFNNKKKPLKHVSKWKSIADCIQLKPDIIIIHEKGHQPTASTFHTEGNNLADKLATQGSYVVNAGKRTADGSEFEKRTADGSEFESPKKKAKVE

SEQ ID NO: 6952 - protein, 2176 aa, synthetic construct
MPAAKRVKLDGGDKKYSIGLDIGTNSVGWAVITDEYKVPSKKFKVLGNTDRHSIKKNLIGALLFDSGETAEATRLKRTARRRYTRRKNRICYLQEIFSNEMAKVDDSFFHRLEESFLVEEDKKHERHPIFGNIVDEVAYHEKYPTIYHLRKKLVDSTDKADLRLIYLALAHMIKFRGHFLIEGDLNPDNSDVDKLFIQLVQTYNQLFEENPINASGVDAKAILSARLSKSRRLENLIAQLPGEKKNGLFGNLIALSLGLTPNFKSNFDLAEDAKLQLSKDTYDDDLDNLLAQIGDQYADLFLAAKNLSDAILLSDILRVNTEITKAPLSASMIKRYDEHHQDLTLLKALVRQQLPEKYKEIFFDQSKNGYAGYIDGGASQEEFYKFIKPILEKMDGTEELLVKLNREDLLRKQRTFDNGSIPHQIHLGELHAILRRQEDFYPFLKDNREKIEKILTFRIPYYVGPLARGNSRFAWMTRKSEETITPWNFEEVVDKGASAQSFIERMTNFDKNLPNEKVLPKHSLLYEYFTVYNELTKVKYVTEGMRKPAFLSGEQKKAIVDLLFKTNRKVTVKQLKEDYFKKIECFDSVEISGVEDRFNASLGTYHDLLKIIKDKDFLDNEENEDILEDIVLTLTLFEDREMIEERLKTYAHLFDDKVMKQLKRRRYTGWGRLSRKLINGIRDKQSGKTILDFLKSDGFANRNFMQLIHDDSLTFKEDIQKAQVSGQGDSLHEHIANLAGSPAIKKGILQTVKVVDELVKVMGRHKPENIVIEMARENQTTQKGQKNSRERMKRIEEGIKELGSQILKEHPVENTQLQNEKLYLYYLQNGRDMYVDQELDINRLSDYDVDHIVPQSFLKDDSIDNKVLTRSDKARGKSDNVPSEEVVKKMKNYWRQLLNAKLITQRKFDNLTKAERGGLSELDKAGFIKRQLVETRQITKHVAQILDSRMNTKYDENDKLIREVKVITLKSKLVSDFRKDFQFYKVREINNYHHAHDAYLNAVVGTALIKKYPKLESEFVYGDYKVYDVRKMIAKSEQEIGKATAKYFFYSNIMNFFKTEITLANGEIRKRPLIETNGETGEIVWDKGRDFATVRKVLSMPQVNIVKKTEVQTGGFSKESILPKRNSDKLIARKKDWDPKKYGGFDSPTVAYSVLVVAKVEKGKSKKLKSVKELLGITIMERSSFEKNPIDFLEAKGYKEVKKDLIIKLPKYSLFELENGRKRMLASAGELQKGNELALPSKYVNFLYLASHYEKLKGSPEDNEQKQLFVEQHKHYLDEIIEQISEFSKRVILADANLDKVLSAYNKHRDKPIREQAENIIHLFTLTNLGAPAAFKYFDTTIDRKRYTSTKEVLDATLIHQSITGLYETRIDLSQLGGDGGEAAAKGGSGGGGGMDPLQLLQPLEAEIKGTKLKAHWNSGATITCVPQAFLEEEVPIKNIWIKTIHGEKEQPVYYLTFKIQGRKVEAEVISSPYDYILVSPSDIPWLMKKPLQLTTLVPLQEYEERLLKQTMLTGSYKEKLQSLFLKYDALWQHWENQVGHRRIKPHHIATGTVNPRPQKQYPINPKAKASIQTVINDLLKQGVLIQQNSIMNTPVYPVPKPDGKWRMVLDYREVNKTIPLIAAQNQHSAGILSSIFRGKYKTTLDLSNGFWAHSITPESYWLTAFTWLGQQYCWTRLPQGFLNSPALFNADVVDLLKEVPNVQVYVDDIYISHDDPREHLEQLEKVFSLLLNAGYVVSLKKSEIAQHEVEFLGFNITKEGRGLTETFKQKLLNITPPRDLKQLQSILGKLNFARNFIPNFSELVKPLYNIIATAPGKYITWTTDNSQQLQNIISMLNSAENLEERNPEVRLIMKVNTSPSAGYIRFYNEFAKRPIMYLNYVYTKAEVKFTNTEKLLTTIHKGLIKALDLGMGQEILVYSPIVSMTKIQKTPLPERKALPIRWITWMSYLEDPRIQFHYDKTLPELQQVPTVTDDIIAKIKHPSEFSMVFYTDGSAIKHPNVNKSHNAGMGIAQVQFKPEFTVINTWSIPLGDHTAQLAEVAAVEFACKKALKIDGPVLIVTDSFYVAESVNKELPYWQSNGFFNNKKKPLKHVSKWKSIADCIQLKPDIIIIHEKGHQPTASTFHTEGNNLADKLATQGSYVVNAGKRTADGSEFEKRTADGSEFESPKKKAKVE

SEQ ID NO: 6953 - protein, 2094 aa, synthetic construct
MPAAKRVKLDGGDKKYSIGLDIGTNSVGWAVITDEYKVPSKKFKVLGNTDRHSIKKNLIGALLFDSGETAEATRLKRTARRRYTRRKNRICYLQEIFSNEMAKVDDSFFHRLEESFLVEEDKKHERHPIFGNIVDEVAYHEKYPTIYHLRKKLVDSTDKADLRLIYLALAHMIKFRGHFLIEGDLNPDNSDVDKLFIQLVQTYNQLFEENPINASGVDAKAILSARLSKSRRLENLIAQLPGEKKNGLFGNLIALSLGLTPNFKSNFDLAEDAKLQLSKDTYDDDLDNLLAQIGDQYADLFLAAKNLSDAILLSDILRVNTEITKAPLSASMIKRYDEHHQDLTLLKALVRQQLPEKYKEIFFDQSKNGYAGYIDGGASQEEFYKFIKPILEKMDGTEELLVKLNREDLLRKQRTFDNGSIPHQIHLGELHAILRRQEDFYPFLKDNREKIEKILTFRIPYYVGPLARGNSRFAWMTRKSEETITPWNFEEVVDKGASAQSFIERMTNFDKNLPNEKVLPKHSLLYEYFTVYNELTKVKYVTEGMRKPAFLSGEQKKAIVDLLFKTNRKVTVKQLKEDYFKKIECFDSVEISGVEDRFNASLGTYHDLLKIIKDKDFLDNEENEDILEDIVLTLTLFEDREMIEERLKTYAHLFDDKVMKQLKRRRYTGWGRLSRKLINGIRDKQSGKTILDFLKSDGFANRNFMQLIHDDSLTFKEDIQKAQVSGQGDSLHEHIANLAGSPAIKKGILQTVKVVDELVKVMGRHKPENIVIEMARENQTTQKGQKNSRERMKRIEEGIKELGSQILKEHPVENTQLQNEKLYLYYLQNGRDMYVDQELDINRLSDYDVDHIVPQSFLKDDSIDNKVLTRSDKARGKSDNVPSEEVVKKMKNYWRQLLNAKLITQRKFDNLTKAERGGLSELDKAGFIKRQLVETRQITKHVAQILDSRMNTKYDENDKLIREVKVITLKSKLVSDFRKDFQFYKVREINNYHHAHDAYLNAVVGTALIKKYPKLESEFVYGDYKVYDVRKMIAKSEQEIGKATAKYFFYSNIMNFFKTEITLANGEIRKRPLIETNGETGEIVWDKGRDFATVRKVLSMPQVNIVKKTEVQTGGFSKESILPKRNSDKLIARKKDWDPKKYGGFDSPTVAYSVLVVAKVEKGKSKKLKSVKELLGITIMERSSFEKNPIDFLEAKGYKEVKKDLIIKLPKYSLFELENGRKRMLASAGELQKGNELALPSKYVNFLYLASHYEKLKGSPEDNEQKQLFVEQHKHYLDEIIEQISEFSKRVILADANLDKVLSAYNKHRDKPIREQAENIIHLFTLTNLGAPAAFKYFDTTIDRKRYTSTKEVLDATLIHQSITGLYETRIDLSQLGGDGGEAAAKGGSGGGGGVLNLEEEYRLHEKPVPSSIDPSWLQLFPTVWAERAGMGLANQVPPVVVELRSGASPVAVRQYPMSKEAREGIRPHIQRFLDLGVLVPCQSPWNTPLLPVKKPGTNDYRPVQDLREINKRVQDIHPTVPNPYNLLSSLPPSHTWYSVLDLKDAFFCLKLHPNSQPLFAFEWRDPEKGNTGQLTWTRLPQGFKNSPTLFNEALHRDLAPFRALNPQVVLLQYVDDLLVAAPTYRDCKEGTQKLLQELSKLGYRVSAKKAQLCQKEVTYLGYLLKEGKRWLTPARKATVMKIPPPTTPRQVREFLGTAGFCRLWIPGFASLAAPLYPLTKPSIPFIWTEEHQKAFDRIKEALLSAPALALPDLTKPFTLYVDERAGVARGVLTQTLGPWRRPVAYLSKKLDPVASGWPTCLKAVAAVALLLKDADKLTLGQNVTVIASHSLESIVRQPPDRWMTNARMTHYQSLLLNERVSFAPPAVLNPATLLPVESEATPVHRCSEILAEETGTRRDLKDQPLPGVPAWYTDGSSFIAEGKRRAGAAIVDGKRTVWASSLPEGTSAQKAELVALTQALRLAEGKDINIYTDSRYAFATAHIHGAIYKQRGWLTSAGKDIKNKEEILALLEAIHLPKRVAIIHCPGHQKGNDPVATGNRRADEAAKQAALSTRVLAETTKPAGKRTADGSEFEKRTADGSEFESPKKKAKVE

SEQ ID NO: 6954 - protein, 2094 aa, synthetic construct
MPAAKRVKLDGGDKKYSIGLDIGTNSVGWAVITDEYKVPSKKFKVLGNTDRHSIKKNLIGALLFDSGETAEATRLKRTARRRYTRRKNRICYLQEIFSNEMAKVDDSFFHRLEESFLVEEDKKHERHPIFGNIVDEVAYHEKYPTIYHLRKKLVDSTDKADLRLIYLALAHMIKFRGHFLIEGDLNPDNSDVDKLFIQLVQTYNQLFEENPINASGVDAKAILSARLSKSRRLENLIAQLPGEKKNGLFGNLIALSLGLTPNFKSNFDLAEDAKLQLSKDTYDDDLDNLLAQIGDQYADLFLAAKNLSDAILLSDILRVNTEITKAPLSASMIKRYDEHHQDLTLLKALVRQQLPEKYKEIFFDQSKNGYAGYIDGGASQEEFYKFIKPILEKMDGTEELLVKLNREDLLRKQRTFDNGSIPHQIHLGELHAILRRQEDFYPFLKDNREKIEKILTFRIPYYVGPLARGNSRFAWMTRKSEETITPWNFEEVVDKGASAQSFIERMTNFDKNLPNEKVLPKHSLLYEYFTVYNELTKVKYVTEGMRKPAFLSGEQKKAIVDLLFKTNRKVTVKQLKEDYFKKIECFDSVEISGVEDRFNASLGTYHDLLKIIKDKDFLDNEENEDILEDIVLTLTLFEDREMIEERLKTYAHLFDDKVMKQLKRRRYTGWGRLSRKLINGIRDKQSGKTILDFLKSDGFANRNFMQLIHDDSLTFKEDIQKAQVSGQGDSLHEHIANLAGSPAIKKGILQTVKVVDELVKVMGRHKPENIVIEMARENQTTQKGQKNSRERMKRIEEGIKELGSQILKEHPVENTQLQNEKLYLYYLQNGRDMYVDQELDINRLSDYDVDHIVPQSFLKDDSIDNKVLTRSDKARGKSDNVPSEEVVKKMKNYWRQLLNAKLITQRKFDNLTKAERGGLSELDKAGFIKRQLVETRQITKHVAQILDSRMNTKYDENDKLIREVKVITLKSKLVSDFRKDFQFYKVREINNYHHAHDAYLNAVVGTALIKKYPKLESEFVYGDYKVYDVRKMIAKSEQEIGKATAKYFFYSNIMNFFKTEITLANGEIRKRPLIETNGETGEIVWDKGRDFATVRKVLSMPQVNIVKKTEVQTGGFSKESILPKRNSDKLIARKKDWDPKKYGGFDSPTVAYSVLVVAKVEKGKSKKLKSVKELLGITIMERSSFEKNPIDFLEAKGYKEVKKDLIIKLPKYSLFELENGRKRMLASAGELQKGNELALPSKYVNFLYLASHYEKLKGSPEDNEQKQLFVEQHKHYLDEIIEQISEFSKRVILADANLDKVLSAYNKHRDKPIREQAENIIHLFTLTNLGAPAAFKYFDTTIDRKRYTSTKEVLDATLIHQSITGLYETRIDLSQLGGDGGEAAAKGGSGGGGGVLNLEEEYRLHEKPVPSSIDPSWLQLFPTVWAERAGMGLANQVPPVVVELRSGASPVAVRQYPMSKEAREGIRPHIQRFLDLGVLVPCQSPWNTPLLPVKKPGTNDYRPVQDLREINKRVQDIHPTVPNPYNLLSSLPPSHTWYSVLDLKDAFFCLKLHPNSQPLFAFEWRDPEKGNTGQLTWTRLPQGFKNSPTLFNEALHRDLAPFRALNPQVVLLQYVDDLLVAAPTYRDCKEGTQKLLQELSKLGYRVSAKKAQLCQKEVTYLGYLLKEGKRWLTPARKATVMKIPPPTTPRQVREFLGKAGFCRLFIPGFASLAAPLYPLTKPSIPFIWTEEHQKAFDRIKEALLSAPALALPDLTKPFTLYVDERAGVARGVLTQTLGPWRRPVAYLSKKLDPVASGWPTCLKAVAAVALLLKDADKLTLGQNVTVIASHSLESIVRQPPDRWMTNARMTHYQSLLLNERVSFAPPAVLNPATLLPVESEATPVHRCSEILAEETGTRRDLKDQPLPGVPAWYTDGSSFIAEGKRRAGAAIVDGKRTVWASSLPEGTSAQKAELVALTQALRLAEGKDINIYTDSRYAFATAHIHGAIYKQRGWLTSAGKDIKNKEEILALLEAIHLPKRVAIIHCPGHQKGNDPVATGNRRADEAAKQAALSTRVLAETTKPAGKRTADGSEFEKRTADGSEFESPKKKAKVE

SEQ ID NO: 6955 - protein, 2096 aa, synthetic construct
MPAAKRVKLDGGDKKYSIGLDIGTNSVGWAVITDEYKVPSKKFKVLGNTDRHSIKKNLIGALLFDSGETAEATRLKRTARRRYTRRKNRICYLQEIFSNEMAKVDDSFFHRLEESFLVEEDKKHERHPIFGNIVDEVAYHEKYPTIYHLRKKLVDSTDKADLRLIYLALAHMIKFRGHFLIEGDLNPDNSDVDKLFIQLVQTYNQLFEENPINASGVDAKAILSARLSKSRRLENLIAQLPGEKKNGLFGNLIALSLGLTPNFKSNFDLAEDAKLQLSKDTYDDDLDNLLAQIGDQYADLFLAAKNLSDAILLSDILRVNTEITKAPLSASMIKRYDEHHQDLTLLKALVRQQLPEKYKEIFFDQSKNGYAGYIDGGASQEEFYKFIKPILEKMDGTEELLVKLNREDLLRKQRTFDNGSIPHQIHLGELHAILRRQEDFYPFLKDNREKIEKILTFRIPYYVGPLARGNSRFAWMTRKSEETITPWNFEEVVDKGASAQSFIERMTNFDKNLPNEKVLPKHSLLYEYFTVYNELTKVKYVTEGMRKPAFLSGEQKKAIVDLLFKTNRKVTVKQLKEDYFKKIECFDSVEISGVEDRFNASLGTYHDLLKIIKDKDFLDNEENEDILEDIVLTLTLFEDREMIEERLKTYAHLFDDKVMKQLKRRRYTGWGRLSRKLINGIRDKQSGKTILDFLKSDGFANRNFMQLIHDDSLTFKEDIQKAQVSGQGDSLHEHIANLAGSPAIKKGILQTVKVVDELVKVMGRHKPENIVIEMARENQTTQKGQKNSRERMKRIEEGIKELGSQILKEHPVENTQLQNEKLYLYYLQNGRDMYVDQELDINRLSDYDVDHIVPQSFLKDDSIDNKVLTRSDKARGKSDNVPSEEVVKKMKNYWRQLLNAKLITQRKFDNLTKAERGGLSELDKAGFIKRQLVETRQITKHVAQILDSRMNTKYDENDKLIREVKVITLKSKLVSDFRKDFQFYKVREINNYHHAHDAYLNAVVGTALIKKYPKLESEFVYGDYKVYDVRKMIAKSEQEIGKATAKYFFYSNIMNFFKTEITLANGEIRKRPLIETNGETGEIVWDKGRDFATVRKVLSMPQVNIVKKTEVQTGGFSKESILPKRNSDKLIARKKDWDPKKYGGFDSPTVAYSVLVVAKVEKGKSKKLKSVKELLGITIMERSSFEKNPIDFLEAKGYKEVKKDLIIKLPKYSLFELENGRKRMLASAGELQKGNELALPSKYVNFLYLASHYEKLKGSPEDNEQKQLFVEQHKHYLDEIIEQISEFSKRVILADANLDKVLSAYNKHRDKPIREQAENIIHLFTLTNLGAPAAFKYFDTTIDRKRYTSTKEVLDATLIHQSITGLYETRIDLSQLGGDGGEAAAKGGSGGGGGTLNIEDEYRLHETSKEPDVPLGSTWLSDFPQAWAETGGMGLAVRQAPLIIPLKATSTPVSIKQYPMSQEARLGIKPHIQRLLDQGILVPCQSPWNTPLLPVKKPGTNDYRPVQDLREVNKRVEDIHPTVPNPYNLLSGLPPSHQWYTVLDLKDAFFCLRLHPTSQPLFAFEWRDPEMGISGQLTWTRLPQGFKNSPTLFDEALHRDLADFRIQHPDLILLQYVDDLLLAATSEQDCQRGTRALLQTLGNLGYRASAKKAQICQKQVKYLGYLLKEGQRWLTEARKETVMGQPTPKTPRQLREFLGTAGFCRLWIPGFAEMAAPLYPLTKTGTLFNWGPDQQKAYQEIKQALLTAPALGLPDLTKPFELFVDEKQGYAKGVLTQKLGPWRRPVAYLSKKLDPVAAGWPPCLRMVAAIAVLTKDAGKLTMGQPLVILAPHAVEALVKQPPDRWLSNARMTHYQAMLLDTDRVQFGPVVALNPATLLPLPEKEAPHDCLEILAETHGTRPDLTDQPIPDADYTWYTDGSSFLQEGQRRAGAAVTTETEVIWARALPAGTSAQRAELIALTQALKMAEGKKLNVYTDSRYAFATAHVHGEIYRRRGLLTSEGREIKNKNEILALLKALFLPKRLSIIHCPGHQKGNSAEARGNRMADQAAREAAMKAVLETSTLLAGKRTADGSEFEKRTADGSEFESPKKKAKVE

SEQ ID NO: 6956 - protein, 2096 aa, synthetic construct
MPAAKRVKLDGGDKKYSIGLDIGTNSVGWAVITDEYKVPSKKFKVLGNTDRHSIKKNLIGALLFDSGETAEATRLKRTARRRYTRRKNRICYLQEIFSNEMAKVDDSFFHRLEESFLVEEDKKHERHPIFGNIVDEVAYHEKYPTIYHLRKKLVDSTDKADLRLIYLALAHMIKFRGHFLIEGDLNPDNSDVDKLFIQLVQTYNQLFEENPINASGVDAKAILSARLSKSRRLENLIAQLPGEKKNGLFGNLIALSLGLTPNFKSNFDLAEDAKLQLSKDTYDDDLDNLLAQIGDQYADLFLAAKNLSDAILLSDILRVNTEITKAPLSASMIKRYDEHHQDLTLLKALVRQQLPEKYKEIFFDQSKNGYAGYIDGGASQEEFYKFIKPILEKMDGTEELLVKLNREDLLRKQRTFDNGSIPHQIHLGELHAILRRQEDFYPFLKDNREKIEKILTFRIPYYVGPLARGNSRFAWMTRKSEETITPWNFEEVVDKGASAQSFIERMTNFDKNLPNEKVLPKHSLLYEYFTVYNELTKVKYVTEGMRKPAFLSGEQKKAIVDLLFKTNRKVTVKQLKEDYFKKIECFDSVEISGVEDRFNASLGTYHDLLKIIKDKDFLDNEENEDILEDIVLTLTLFEDREMIEERLKTYAHLFDDKVMKQLKRRRYTGWGRLSRKLINGIRDKQSGKTILDFLKSDGFANRNFMQLIHDDSLTFKEDIQKAQVSGQGDSLHEHIANLAGSPAIKKGILQTVKVVDELVKVMGRHKPENIVIEMARENQTTQKGQKNSRERMKRIEEGIKELGSQILKEHPVENTQLQNEKLYLYYLQNGRDMYVDQELDINRLSDYDVDHIVPQSFLKDDSIDNKVLTRSDKARGKSDNVPSEEVVKKMKNYWRQLLNAKLITQRKFDNLTKAERGGLSELDKAGFIKRQLVETRQITKHVAQILDSRMNTKYDENDKLIREVKVITLKSKLVSDFRKDFQFYKVREINNYHHAHDAYLNAVVGTALIKKYPKLESEFVYGDYKVYDVRKMIAKSEQEIGKATAKYFFYSNIMNFFKTEITLANGEIRKRPLIETNGETGEIVWDKGRDFATVRKVLSMPQVNIVKKTEVQTGGFSKESILPKRNSDKLIARKKDWDPKKYGGFDSPTVAYSVLVVAKVEKGKSKKLKSVKELLGITIMERSSFEKNPIDFLEAKGYKEVKKDLIIKLPKYSLFELENGRKRMLASAGELQKGNELALPSKYVNFLYLASHYEKLKGSPEDNEQKQLFVEQHKHYLDEIIEQISEFSKRVILADANLDKVLSAYNKHRDKPIREQAENIIHLFTLTNLGAPAAFKYFDTTIDRKRYTSTKEVLDATLIHQSITGLYETRIDLSQLGGDGGEAAAKGGSGGGGGTLNIEDEYRLHETSKEPDVPLGSTWLSDFPQAWAETGGMGLAVRQAPLIIPLKATSTPVSIKQYPMSQEARLGIKPHIQRLLDQGILVPCQSPWNTPLLPVKKPGTNDYRPVQDLREVNKRVEDIHPTVPNPYNLLSGLPPSHQWYTVLDLKDAFFCLRLHPTSQPLFAFEWRDPEMGISGQLTWTRLPQGFKNSPTLFNEALHRDLADFRIQHPDLILLQYVDDLLLAATSEQDCQRGTRALLQTLGNLGYRASAKKAQICQKQVKYLGYLLKEGQRWLTEARKETVMGQPTPKTPRQLREFLGTAGFCRLWIPGFAEMAAPLYPLTKPGTLFNWGPDQQKAYQEIKQALLTAPALGLPDLTKPFELFVDEKQGYAKGVLTQKLGPWRRPVAYLSKKLDPVAAGWPPCLRMVAAIAVLTKDAGKLTMGQPLVILAPHAVEALVKQPPDRWLSNARMTHYQAMLLDTDRVQFGPVVALNPATLLPLPEKEAPHDCLEILAETHGTRPDLTDQPIPDADYTWYTDGSSFLQEGQRRAGAAVTTETEVIWARALPAGTSAQRAELIALTQALKMAEGKKLNVYTDSRYAFATAHVHGEIYRRRGWLTSEGREIKNKNEILALLKALFLPKRLSIIHCPGHQKGNSAEARGNRMADQAAREAAMKAVLETSTLLAGKRTADGSEFEKRTADGSEFESPKKKAKVE

SEQ ID NO: 6957 - protein, 2102 aa, synthetic construct
MPAAKRVKLDGGDKKYSIGLDIGTNSVGWAVITDEYKVPSKKFKVLGNTDRHSIKKNLIGALLFDSGETAEATRLKRTARRRYTRRKNRICYLQEIFSNEMAKVDDSFFHRLEESFLVEEDKKHERHPIFGNIVDEVAYHEKYPTIYHLRKKLVDSTDKADLRLIYLALAHMIKFRGHFLIEGDLNPDNSDVDKLFIQLVQTYNQLFEENPINASGVDAKAILSARLSKSRRLENLIAQLPGEKKNGLFGNLIALSLGLTPNFKSNFDLAEDAKLQLSKDTYDDDLDNLLAQIGDQYADLFLAAKNLSDAILLSDILRVNTEITKAPLSASMIKRYDEHHQDLTLLKALVRQQLPEKYKEIFFDQSKNGYAGYIDGGASQEEFYKFIKPILEKMDGTEELLVKLNREDLLRKQRTFDNGSIPHQIHLGELHAILRRQEDFYPFLKDNREKIEKILTFRIPYYVGPLARGNSRFAWMTRKSEETITPWNFEEVVDKGASAQSFIERMTNFDKNLPNEKVLPKHSLLYEYFTVYNELTKVKYVTEGMRKPAFLSGEQKKAIVDLLFKTNRKVTVKQLKEDYFKKIECFDSVEISGVEDRFNASLGTYHDLLKIIKDKDFLDNEENEDILEDIVLTLTLFEDREMIEERLKTYAHLFDDKVMKQLKRRRYTGWGRLSRKLINGIRDKQSGKTILDFLKSDGFANRNFMQLIHDDSLTFKEDIQKAQVSGQGDSLHEHIANLAGSPAIKKGILQTVKVVDELVKVMGRHKPENIVIEMARENQTTQKGQKNSRERMKRIEEGIKELGSQILKEHPVENTQLQNEKLYLYYLQNGRDMYVDQELDINRLSDYDVDHIVPQSFLKDDSIDNKVLTRSDKARGKSDNVPSEEVVKKMKNYWRQLLNAKLITQRKFDNLTKAERGGLSELDKAGFIKRQLVETRQITKHVAQILDSRMNTKYDENDKLIREVKVITLKSKLVSDFRKDFQFYKVREINNYHHAHDAYLNAVVGTALIKKYPKLESEFVYGDYKVYDVRKMIAKSEQEIGKATAKYFFYSNIMNFFKTEITLANGEIRKRPLIETNGETGEIVWDKGRDFATVRKVLSMPQVNIVKKTEVQTGGFSKESILPKRNSDKLIARKKDWDPKKYGGFDSPTVAYSVLVVAKVEKGKSKKLKSVKELLGITIMERSSFEKNPIDFLEAKGYKEVKKDLIIKLPKYSLFELENGRKRMLASAGELQKGNELALPSKYVNFLYLASHYEKLKGSPEDNEQKQLFVEQHKHYLDEIIEQISEFSKRVILADANLDKVLSAYNKHRDKPIREQAENIIHLFTLTNLGAPAAFKYFDTTIDRKRYTSTKEVLDATLIHQSITGLYETRIDLSQLGGDGGEAAAKGGGGGSGGTVSLQDEHRLFDIPVTTSLPDVWLQDFPQAWAETGGLGRAKCQAPIIIDLKPTAVPVSIKQYPMSLEAHMGIRQHIIKFLELGVLRPCRSPWNTPLLPVKKPGTQDYRPVQDLREINKRTVDIHPTVPNPYNLLSTLKPDYSWYTVLDLKDAFFCLPLAPQSQELFAFEWKDPERGISGQLTWTRLPQGFKNSPTLFNEALHRDLTDFRTQHPEVTLLQYVDDLLLAAPTKKACTQGTRHLLQELGEKGYRASAKKAQICQTKVTYLGYILSEGKRWLTPGRIETVARIPPPRNPREVREFLGKAGFCRLFIPGFAELAAPLYALTKPSTPFTWQTEHQLAFEALKKALLSAPALGLPDTSKPFTLFLDERQGIAKGVLTQKLGPWKRPVAYLSKKLDPVAAGWPPCLRIMAATAMLVKDSAKLTLGQPLTVITPHTLEAIVRQPPDRWITNARLTHYQALLLDTDRVQFGPPVTLNPATLLPVPENQPSPHDCRQVLAETHGTREDLKDQELPDADHTWYTDGSSYLDSGTRRAGAAVVDGHNTIWAQSLPPGTSAQKAELIALTKALELSKGKKANIYTDSRYAFATAHTHGSIYERRGWLTSEGKEIKNKAEIIALLKALFLPQEVAIIHCPGHQKGQDPVAVGNRQADRVARQAAMAEVLTLATEPDNTSHITAGKRTADGSEFEKRTADGSEFESPKKKAKVE

SEQ ID NO: 6958 - protein, 2095 aa, synthetic construct
MPAAKRVKLDGGDKKYSIGLDIGTNSVGWAVITDEYKVPSKKFKVLGNTDRHSIKKNLIGALLFDSGETAEATRLKRTARRRYTRRKNRICYLQEIFSNEMAKVDDSFFHRLEESFLVEEDKKHERHPIFGNIVDEVAYHEKYPTIYHLRKKLVDSTDKADLRLIYLALAHMIKFRGHFLIEGDLNPDNSDVDKLFIQLVQTYNQLFEENPINASGVDAKAILSARLSKSRRLENLIAQLPGEKKNGLFGNLIALSLGLTPNFKSNFDLAEDAKLQLSKDTYDDDLDNLLAQIGDQYADLFLAAKNLSDAILLSDILRVNTEITKAPLSASMIKRYDEHHQDLTLLKALVRQQLPEKYKEIFFDQSKNGYAGYIDGGASQEEFYKFIKPILEKMDGTEELLVKLNREDLLRKQRTFDNGSIPHQIHLGELHAILRRQEDFYPFLKDNREKIEKILTFRIPYYVGPLARGNSRFAWMTRKSEETITPWNFEEVVDKGASAQSFIERMTNFDKNLPNEKVLPKHSLLYEYFTVYNELTKVKYVTEGMRKPAFLSGEQKKAIVDLLFKTNRKVTVKQLKEDYFKKIECFDSVEISGVEDRFNASLGTYHDLLKIIKDKDFLDNEENEDILEDIVLTLTLFEDREMIEERLKTYAHLFDDKVMKQLKRRRYTGWGRLSRKLINGIRDKQSGKTILDFLKSDGFANRNFMQLIHDDSLTFKEDIQKAQVSGQGDSLHEHIANLAGSPAIKKGILQTVKVVDELVKVMGRHKPENIVIEMARENQTTQKGQKNSRERMKRIEEGIKELGSQILKEHPVENTQLQNEKLYLYYLQNGRDMYVDQELDINRLSDYDVDHIVPQSFLKDDSIDNKVLTRSDKARGKSDNVPSEEVVKKMKNYWRQLLNAKLITQRKFDNLTKAERGGLSELDKAGFIKRQLVETRQITKHVAQILDSRMNTKYDENDKLIREVKVITLKSKLVSDFRKDFQFYKVREINNYHHAHDAYLNAVVGTALIKKYPKLESEFVYGDYKVYDVRKMIAKSEQEIGKATAKYFFYSNIMNFFKTEITLANGEIRKRPLIETNGETGEIVWDKGRDFATVRKVLSMPQVNIVKKTEVQTGGFSKESILPKRNSDKLIARKKDWDPKKYGGFDSPTVAYSVLVVAKVEKGKSKKLKSVKELLGITIMERSSFEKNPIDFLEAKGYKEVKKDLIIKLPKYSLFELENGRKRMLASAGELQKGNELALPSKYVNFLYLASHYEKLKGSPEDNEQKQLFVEQHKHYLDEIIEQISEFSKRVILADANLDKVLSAYNKHRDKPIREQAENIIHLFTLTNLGAPAAFKYFDTTIDRKRYTSTKEVLDATLIHQSITGLYETRIDLSQLGGDGGEAAAKGGGGGSGGTLQLEEEYRLFEPESTQKQEMDIWLKNFPQAWAETGGMGTAHCQAPVLIQLKATATPISIRQYPMPHEAYQGIKPHIRRMLDQGILKPCQSPWNTPLLPVKKPGTEDYRPVQDLREVNKRVEDIHPTVPNPYNLLSTLPPSHPWYTVLDLKDAFFCLRLHSESQLLFAFEWRDPEIGLSGQLTWTRLPQGFKNSPTLFNEALHSDLADFRVRYPALVLLQYVDDLLLAAATRTECLEGTKALLETLGNKGYRASAKKAQICLQEVTYLGYSLKDGQRWLTKARKEAILSIPVPKNSRQVREFLGTAGYCRLWIPGFAELAAPLYPLTRPGTLFQWGTEQQLAFEDIKKALLSSPALGLPDITKPFELFIDENSGFAKGVLVQKLGPWKRPVAYLSKKLDTVASGWPPCLRMVAAIAILVKDAGKLTLGQPLTILTSHPVEALVRQPPNKWLSNARMTHYQAMLLDAERVHFGPTVSLNPATLLPLPSGGNHHDCLQILAETHGTRPDLTDQPLPDADLTWYTDGSSFIRNGEREAGAAVTTESEVIWAAPLPPGTSAQRAELIALTQALKMAEGKKLTVYTDSRYAFATTHVHGEIYRRRGWLTSEGKEIKNKNEILALLEALFLPKRLSIIHCPGHQKGDSPQAKGNRLADDTAKKAATETHSSLTVLPAGKRTADGSEFEKRTADGSEFESPKKKAKVE

SEQ ID NO: 6959 - protein, 2087 aa, synthetic construct
MPAAKRVKLDGGDKKYSIGLDIGTNSVGWAVITDEYKVPSKKFKVLGNTDRHSIKKNLIGALLFDSGETAEATRLKRTARRRYTRRKNRICYLQEIFSNEMAKVDDSFFHRLEESFLVEEDKKHERHPIFGNIVDEVAYHEKYPTIYHLRKKLVDSTDKADLRLIYLALAHMIKFRGHFLIEGDLNPDNSDVDKLFIQLVQTYNQLFEENPINASGVDAKAILSARLSKSRRLENLIAQLPGEKKNGLFGNLIALSLGLTPNFKSNFDLAEDAKLQLSKDTYDDDLDNLLAQIGDQYADLFLAAKNLSDAILLSDILRVNTEITKAPLSASMIKRYDEHHQDLTLLKALVRQQLPEKYKEIFFDQSKNGYAGYIDGGASQEEFYKFIKPILEKMDGTEELLVKLNREDLLRKQRTFDNGSIPHQIHLGELHAILRRQEDFYPFLKDNREKIEKILTFRIPYYVGPLARGNSRFAWMTRKSEETITPWNFEEVVDKGASAQSFIERMTNFDKNLPNEKVLPKHSLLYEYFTVYNELTKVKYVTEGMRKPAFLSGEQKKAIVDLLFKTNRKVTVKQLKEDYFKKIECFDSVEISGVEDRFNASLGTYHDLLKIIKDKDFLDNEENEDILEDIVLTLTLFEDREMIEERLKTYAHLFDDKVMKQLKRRRYTGWGRLSRKLINGIRDKQSGKTILDFLKSDGFANRNFMQLIHDDSLTFKEDIQKAQVSGQGDSLHEHIANLAGSPAIKKGILQTVKVVDELVKVMGRHKPENIVIEMARENQTTQKGQKNSRERMKRIEEGIKELGSQILKEHPVENTQLQNEKLYLYYLQNGRDMYVDQELDINRLSDYDVDHIVPQSFLKDDSIDNKVLTRSDKARGKSDNVPSEEVVKKMKNYWRQLLNAKLITQRKFDNLTKAERGGLSELDKAGFIKRQLVETRQITKHVAQILDSRMNTKYDENDKLIREVKVITLKSKLVSDFRKDFQFYKVREINNYHHAHDAYLNAVVGTALIKKYPKLESEFVYGDYKVYDVRKMIAKSEQEIGKATAKYFFYSNIMNFFKTEITLANGEIRKRPLIETNGETGEIVWDKGRDFATVRKVLSMPQVNIVKKTEVQTGGFSKESILPKRNSDKLIARKKDWDPKKYGGFDSPTVAYSVLVVAKVEKGKSKKLKSVKELLGITIMERSSFEKNPIDFLEAKGYKEVKKDLIIKLPKYSLFELENGRKRMLASAGELQKGNELALPSKYVNFLYLASHYEKLKGSPEDNEQKQLFVEQHKHYLDEIIEQISEFSKRVILADANLDKVLSAYNKHRDKPIREQAENIIHLFTLTNLGAPAAFKYFDTTIDRKRYTSTKEVLDATLIHQSITGLYETRIDLSQLGGDGGEAAAKGGGGGSGGVPWLTQQPLQLTILVPLQEYQEKILSKTALPEDQKQQLKTLFVKYDNLWQHWENQVGHRKIRPHNIATGDYPPRPQKQYPINPKAKPSIQIVIDDLLKQGVLTPQNSTMNTPVYPVPKPDGRWRMVLDYREVNKTIPLTAAQNQHSAGILATIVRQKYKTTLDLANGFWAHPITPESYWLTAFTWQGKQYCWTRLPQGFLNSPALFNADVVDLLKEIPNVQVYVDDIYLSHDDPKEHVQQLEKVFQILLQAGYVVSLKKSEIGQKTVEFLGFNITKEGRGLTDTFKTKLLNITPPKDLKQLQSILGKLNFARNFIPNFAELVQPLYNLIAPAKGKYIEWSEENTKQLNMVIEALNTASNLEERLPEQRLVIKVNTSPSAGYVRYYNETGKKPIMYLNYVFSKAELKFSMLEKLLTTMHKALIKAMDLAMGQEILVYSPIVSMTKIQKTPLPERKALPIRWITWMTYLEDPRIQFHYDKTLPELKHIPDVYTSSQSPVKHPSQYEGVFYTDGSAIKSPDPTKSNNAGMGIVHATYKPEYQVLNQWSIPLGNHTAQMAEIAAVEFACKKALKIPGPVLVITDSFYVAESANKELPYWKSNGFVNNKKKPLKHISKWKSIAECLSMKPDITIQHEKGISLQIPVFILKGNALADKLATQGSYVVNAGKRTADGSEFEKRTADGSEFESPKKKAKVE

SEQ ID NO: 6960 - protein, 2218 aa, synthetic construct
MPAAKRVKLDGGDKKYSIGLDIGTNSVGWAVITDEYKVPSKKFKVLGNTDRHSIKKNLIGALLFDSGETAEATRLKRTARRRYTRRKNRICYLQEIFSNEMAKVDDSFFHRLEESFLVEEDKKHERHPIFGNIVDEVAYHEKYPTIYHLRKKLVDSTDKADLRLIYLALAHMIKFRGHFLIEGDLNPDNSDVDKLFIQLVQTYNQLFEENPINASGVDAKAILSARLSKSRRLENLIAQLPGEKKNGLFGNLIALSLGLTPNFKSNFDLAEDAKLQLSKDTYDDDLDNLLAQIGDQYADLFLAAKNLSDAILLSDILRVNTEITKAPLSASMIKRYDEHHQDLTLLKALVRQQLPEKYKEIFFDQSKNGYAGYIDGGASQEEFYKFIKPILEKMDGTEELLVKLNREDLLRKQRTFDNGSIPHQIHLGELHAILRRQEDFYPFLKDNREKIEKILTFRIPYYVGPLARGNSRFAWMTRKSEETITPWNFEEVVDKGASAQSFIERMTNFDKNLPNEKVLPKHSLLYEYFTVYNELTKVKYVTEGMRKPAFLSGEQKKAIVDLLFKTNRKVTVKQLKEDYFKKIECFDSVEISGVEDRFNASLGTYHDLLKIIKDKDFLDNEENEDILEDIVLTLTLFEDREMIEERLKTYAHLFDDKVMKQLKRRRYTGWGRLSRKLINGIRDKQSGKTILDFLKSDGFANRNFMQLIHDDSLTFKEDIQKAQVSGQGDSLHEHIANLAGSPAIKKGILQTVKVVDELVKVMGRHKPENIVIEMARENQTTQKGQKNSRERMKRIEEGIKELGSQILKEHPVENTQLQNEKLYLYYLQNGRDMYVDQELDINRLSDYDVDHIVPQSFLKDDSIDNKVLTRSDKARGKSDNVPSEEVVKKMKNYWRQLLNAKLITQRKFDNLTKAERGGLSELDKAGFIKRQLVETRQITKHVAQILDSRMNTKYDENDKLIREVKVITLKSKLVSDFRKDFQFYKVREINNYHHAHDAYLNAVVGTALIKKYPKLESEFVYGDYKVYDVRKMIAKSEQEIGKATAKYFFYSNIMNFFKTEITLANGEIRKRPLIETNGETGEIVWDKGRDFATVRKVLSMPQVNIVKKTEVQTGGFSKESILPKRNSDKLIARKKDWDPKKYGGFDSPTVAYSVLVVAKVEKGKSKKLKSVKELLGITIMERSSFEKNPIDFLEAKGYKEVKKDLIIKLPKYSLFELENGRKRMLASAGELQKGNELALPSKYVNFLYLASHYEKLKGSPEDNEQKQLFVEQHKHYLDEIIEQISEFSKRVILADANLDKVLSAYNKHRDKPIREQAENIIHLFTLTNLGAPAAFKYFDTTIDRKRYTSTKEVLDATLIHQSITGLYETRIDLSQLGGDGGEAAAKGGGGGSGGTLGDQGSRGSDPLPEPRVTLTVEGIPTEFLVNTGAEHSVLTKPMGKMGSKRTVVAGATGSKVYPWTTKRLLKIGQKQVTHSFLVIPECPAPLLGRDLLTKLKAQIQFSTEGPQVTWEDRPAMCLVLNLEEEYRLHEKPVPPSIDPSWLQLFPMVWAEKAGMGLANQVPPVVVELKSDASPVAVRQYPMSKEAREGIRPHIQRFLDLGILVPCQSPWNTPLLPVKKPGTNDYRPVQDLREVNKRVQDIHPTVPNPYNLLSSLPPSHTWYSVLDLKDAFFCLKLHPNSQPLFAFEWRDPEKGNTGQLTWTRLPQGFKNSPTLFDEALHRDLASFRALNPQVVMLQYVDDLLVAAPTYRDCKEGTRRLLQELSKLGYRVSAKKAQLCREEVTYLGYLLKGGKRWLTPARKATVMKIPTPTTPRQVREFLGTAGFCRLWIPGFASLAAPLYPLTREKVPFTWTEAHQEAFGRIKEALLSAPALALPDLTKPFALYVDEKEGVARGVLTQTLGPWRRPVAYLSKKLDPVASGWPTCLKAIAAVALLLKDADKLTLGQNVLVIAPHNLESIVRQPPDRWMTNARMTHYQSLLLNERVSFAPPAILNPATLLPVESDDTPIHICSEILAEETGTRPDLRDQPLPGVPAWYTDGSSFIMDGRRQAGAAIVDNKRTVWASNLPEGTSAQKAELIALTQALRLAEGKSINIYTDSRYAFATAHVHGAIYKQRGLLTSAGKDIKNKEEILALLEAIHLPKRVAIIHCPGHQRGTDPVATGNRKADEAAKQAAQSTRILTETTKNAGKRTADGSEFEKRTADGSEFESPKKKAKVE

SEQ ID NO: 6961 - protein, 2218 aa, synthetic construct
MPAAKRVKLDGGDKKYSIGLDIGTNSVGWAVITDEYKVPSKKFKVLGNTDRHSIKKNLIGALLFDSGETAEATRLKRTARRRYTRRKNRICYLQEIFSNEMAKVDDSFFHRLEESFLVEEDKKHERHPIFGNIVDEVAYHEKYPTIYHLRKKLVDSTDKADLRLIYLALAHMIKFRGHFLIEGDLNPDNSDVDKLFIQLVQTYNQLFEENPINASGVDAKAILSARLSKSRRLENLIAQLPGEKKNGLFGNLIALSLGLTPNFKSNFDLAEDAKLQLSKDTYDDDLDNLLAQIGDQYADLFLAAKNLSDAILLSDILRVNTEITKAPLSASMIKRYDEHHQDLTLLKALVRQQLPEKYKEIFFDQSKNGYAGYIDGGASQEEFYKFIKPILEKMDGTEELLVKLNREDLLRKQRTFDNGSIPHQIHLGELHAILRRQEDFYPFLKDNREKIEKILTFRIPYYVGPLARGNSRFAWMTRKSEETITPWNFEEVVDKGASAQSFIERMTNFDKNLPNEKVLPKHSLLYEYFTVYNELTKVKYVTEGMRKPAFLSGEQKKAIVDLLFKTNRKVTVKQLKEDYFKKIECFDSVEISGVEDRFNASLGTYHDLLKIIKDKDFLDNEENEDILEDIVLTLTLFEDREMIEERLKTYAHLFDDKVMKQLKRRRYTGWGRLSRKLINGIRDKQSGKTILDFLKSDGFANRNFMQLIHDDSLTFKEDIQKAQVSGQGDSLHEHIANLAGSPAIKKGILQTVKVVDELVKVMGRHKPENIVIEMARENQTTQKGQKNSRERMKRIEEGIKELGSQILKEHPVENTQLQNEKLYLYYLQNGRDMYVDQELDINRLSDYDVDHIVPQSFLKDDSIDNKVLTRSDKARGKSDNVPSEEVVKKMKNYWRQLLNAKLITQRKFDNLTKAERGGLSELDKAGFIKRQLVETRQITKHVAQILDSRMNTKYDENDKLIREVKVITLKSKLVSDFRKDFQFYKVREINNYHHAHDAYLNAVVGTALIKKYPKLESEFVYGDYKVYDVRKMIAKSEQEIGKATAKYFFYSNIMNFFKTEITLANGEIRKRPLIETNGETGEIVWDKGRDFATVRKVLSMPQVNIVKKTEVQTGGFSKESILPKRNSDKLIARKKDWDPKKYGGFDSPTVAYSVLVVAKVEKGKSKKLKSVKELLGITIMERSSFEKNPIDFLEAKGYKEVKKDLIIKLPKYSLFELENGRKRMLASAGELQKGNELALPSKYVNFLYLASHYEKLKGSPEDNEQKQLFVEQHKHYLDEIIEQISEFSKRVILADANLDKVLSAYNKHRDKPIREQAENIIHLFTLTNLGAPAAFKYFDTTIDRKRYTSTKEVLDATLIHQSITGLYETRIDLSQLGGDGGEAAAKGGGGGSGGTLGDQGSRGSDPLPEPRVTLTVEGIPTEFLVNTGAEHSVLTKPMGKMGSKRTVVAGATGSKVYPWTTKRLLKIGQKQVTHSFLVIPECPAPLLGRDLLTKLKAQIQFSTEGPQVTWEDRPAMCLVLNLEEEYRLHEKPVPPSIDPSWLQLFPMVWAEKAGMGLANQVPPVVVELKSDASPVAVRQYPMSKEAREGIRPHIQRFLDLGILVPCQSPWNTPLLPVKKPGTNDYRPVQDLREVNKRVQDIHPTVPNPYNLLSSLPPSHTWYSVLDLKDAFFCLKLHPNSQPLFAFEWRDPEKGNTGQLTWTRLPQGFKNSPTLFNEALHRDLASFRALNPQVVMLQYVDDLLVAAPTYRDCKEGTRRLLQELSKLGYRVSAKKAQLCREEVTYLGYLLKGGKRWLTPARKATVMKIPTPTTPRQVREFLGTAGFCRLWIPGFASLAAPLYPLTRPKVPFTWTEAHQEAFGRIKEALLSAPALALPDLTKPFALYVDEKEGVARGVLTQTLGPWRRPVAYLSKKLDPVASGWPTCLKAIAAVALLLKDADKLTLGQNVLVIAPHNLESIVRQPPDRWMTNARMTHYQSLLLNERVSFAPPAILNPATLLPVESDDTPIHICSEILAEETGTRPDLRDQPLPGVPAWYTDGSSFIMDGRRQAGAAIVDNKRTVWASNLPEGTSAQKAELIALTQALRLAEGKSINIYTDSRYAFATAHVHGAIYKQRGWLTSAGKDIKNKEEILALLEAIHLPKRVAIIHCPGHQRGTDPVATGNRKADEAAKQAAQSTRILTETTKNAGKRTADGSEFEKRTADGSEFESPKKKAKVE

SEQ ID NO: 6962 - protein, 2218 aa, synthetic construct
MPAAKRVKLDGGDKKYSIGLDIGTNSVGWAVITDEYKVPSKKFKVLGNTDRHSIKKNLIGALLFDSGETAEATRLKRTARRRYTRRKNRICYLQEIFSNEMAKVDDSFFHRLEESFLVEEDKKHERHPIFGNIVDEVAYHEKYPTIYHLRKKLVDSTDKADLRLIYLALAHMIKFRGHFLIEGDLNPDNSDVDKLFIQLVQTYNQLFEENPINASGVDAKAILSARLSKSRRLENLIAQLPGEKKNGLFGNLIALSLGLTPNFKSNFDLAEDAKLQLSKDTYDDDLDNLLAQIGDQYADLFLAAKNLSDAILLSDILRVNTEITKAPLSASMIKRYDEHHQDLTLLKALVRQQLPEKYKEIFFDQSKNGYAGYIDGGASQEEFYKFIKPILEKMDGTEELLVKLNREDLLRKQRTFDNGSIPHQIHLGELHAILRRQEDFYPFLKDNREKIEKILTFRIPYYVGPLARGNSRFAWMTRKSEETITPWNFEEVVDKGASAQSFIERMTNFDKNLPNEKVLPKHSLLYEYFTVYNELTKVKYVTEGMRKPAFLSGEQKKAIVDLLFKTNRKVTVKQLKEDYFKKIECFDSVEISGVEDRFNASLGTYHDLLKIIKDKDFLDNEENEDILEDIVLTLTLFEDREMIEERLKTYAHLFDDKVMKQLKRRRYTGWGRLSRKLINGIRDKQSGKTILDFLKSDGFANRNFMQLIHDDSLTFKEDIQKAQVSGQGDSLHEHIANLAGSPAIKKGILQTVKVVDELVKVMGRHKPENIVIEMARENQTTQKGQKNSRERMKRIEEGIKELGSQILKEHPVENTQLQNEKLYLYYLQNGRDMYVDQELDINRLSDYDVDHIVPQSFLKDDSIDNKVLTRSDKARGKSDNVPSEEVVKKMKNYWRQLLNAKLITQRKFDNLTKAERGGLSELDKAGFIKRQLVETRQITKHVAQILDSRMNTKYDENDKLIREVKVITLKSKLVSDFRKDFQFYKVREINNYHHAHDAYLNAVVGTALIKKYPKLESEFVYGDYKVYDVRKMIAKSEQEIGKATAKYFFYSNIMNFFKTEITLANGEIRKRPLIETNGETGEIVWDKGRDFATVRKVLSMPQVNIVKKTEVQTGGFSKESILPKRNSDKLIARKKDWDPKKYGGFDSPTVAYSVLVVAKVEKGKSKKLKSVKELLGITIMERSSFEKNPIDFLEAKGYKEVKKDLIIKLPKYSLFELENGRKRMLASAGELQKGNELALPSKYVNFLYLASHYEKLKGSPEDNEQKQLFVEQHKHYLDEIIEQISEFSKRVILADANLDKVLSAYNKHRDKPIREQAENIIHLFTLTNLGAPAAFKYFDTTIDRKRYTSTKEVLDATLIHQSITGLYETRIDLSQLGGDGGEAAAKGGGGGSGGTLGDQGSRGSDPLPEPRVTLTVEGIPTEFLVNTGAEHSVLTKPMGKMGSKRTVVAGATGSKVYPWTTKRLLKIGQKQVTHSFLVIPECPAPLLGRDLLTKLKAQIQFSTEGPQVTWEDRPAMCLVLNLEEEYRLHEKPVPPSIDPSWLQLFPMVWAEKAGMGLANQVPPVVVELKSDASPVAVRQYPMSKEAREGIRPHIQRFLDLGILVPCQSPWNTPLLPVKKPGTNDYRPVQDLREVNKRVQDIHPTVPNPYNLLSSLPPSHTWYSVLDLKDAFFCLKLHPNSQPLFAFEWRDPEKGNTGQLTWTRLPQGFKNSPTLFNEALHRDLASFRALNPQVVMLQYVDDLLVAAPTYRDCKEGTRRLLQELSKLGYRVSAKKAQLCREEVTYLGYLLKGGKRWLTPARKATVMKIPTPTTPRQVREFLGKAGFCRLFIPGFASLAAPLYPLTRPKVPFTWTEAHQEAFGRIKEALLSAPALALPDLTKPFALYVDEKEGVARGVLTQTLGPWRRPVAYLSKKLDPVASGWPTCLKAIAAVALLLKDADKLTLGQNVLVIAPHNLESIVRQPPDRWMTNARMTHYQSLLLNERVSFAPPAILNPATLLPVESDDTPIHICSEILAEETGTRPDLRDQPLPGVPAWYTDGSSFIMDGRRQAGAAIVDNKRTVWASNLPEGTSAQKAELIALTQALRLAEGKSINIYTDSRYAFATAHVHGAIYKQRGWLTSAGKDIKNKEEILALLEAIHLPKRVAIIHCPGHQRGTDPVATGNRKADEAAKQAAQSTRILTETTKNAGKRTADGSEFEKRTADGSEFESPKKKAKVE

SEQ ID NO: 6963 - protein, 2096 aa, synthetic construct
MPAAKRVKLDGGDKKYSIGLDIGTNSVGWAVITDEYKVPSKKFKVLGNTDRHSIKKNLIGALLFDSGETAEATRLKRTARRRYTRRKNRICYLQEIFSNEMAKVDDSFFHRLEESFLVEEDKKHERHPIFGNIVDEVAYHEKYPTIYHLRKKLVDSTDKADLRLIYLALAHMIKFRGHFLIEGDLNPDNSDVDKLFIQLVQTYNQLFEENPINASGVDAKAILSARLSKSRRLENLIAQLPGEKKNGLFGNLIALSLGLTPNFKSNFDLAEDAKLQLSKDTYDDDLDNLLAQIGDQYADLFLAAKNLSDAILLSDILRVNTEITKAPLSASMIKRYDEHHQDLTLLKALVRQQLPEKYKEIFFDQSKNGYAGYIDGGASQEEFYKFIKPILEKMDGTEELLVKLNREDLLRKQRTFDNGSIPHQIHLGELHAILRRQEDFYPFLKDNREKIEKILTFRIPYYVGPLARGNSRFAWMTRKSEETITPWNFEEVVDKGASAQSFIERMTNFDKNLPNEKVLPKHSLLYEYFTVYNELTKVKYVTEGMRKPAFLSGEQKKAIVDLLFKTNRKVTVKQLKEDYFKKIECFDSVEISGVEDRFNASLGTYHDLLKIIKDKDFLDNEENEDILEDIVLTLTLFEDREMIEERLKTYAHLFDDKVMKQLKRRRYTGWGRLSRKLINGIRDKQSGKTILDFLKSDGFANRNFMQLIHDDSLTFKEDIQKAQVSGQGDSLHEHIANLAGSPAIKKGILQTVKVVDELVKVMGRHKPENIVIEMARENQTTQKGQKNSRERMKRIEEGIKELGSQILKEHPVENTQLQNEKLYLYYLQNGRDMYVDQELDINRLSDYDVDHIVPQSFLKDDSIDNKVLTRSDKARGKSDNVPSEEVVKKMKNYWRQLLNAKLITQRKFDNLTKAERGGLSELDKAGFIKRQLVETRQITKHVAQILDSRMNTKYDENDKLIREVKVITLKSKLVSDFRKDFQFYKVREINNYHHAHDAYLNAVVGTALIKKYPKLESEFVYGDYKVYDVRKMIAKSEQEIGKATAKYFFYSNIMNFFKTEITLANGEIRKRPLIETNGETGEIVWDKGRDFATVRKVLSMPQVNIVKKTEVQTGGFSKESILPKRNSDKLIARKKDWDPKKYGGFDSPTVAYSVLVVAKVEKGKSKKLKSVKELLGITIMERSSFEKNPIDFLEAKGYKEVKKDLIIKLPKYSLFELENGRKRMLASAGELQKGNELALPSKYVNFLYLASHYEKLKGSPEDNEQKQLFVEQHKHYLDEIIEQISEFSKRVILADANLDKVLSAYNKHRDKPIREQAENIIHLFTLTNLGAPAAFKYFDTTIDRKRYTSTKEVLDATLIHQSITGLYETRIDLSQLGGDGGEAAAKGGGGGSGGTLNLEDEYRLYETSAEPEVSPGSTWLSDFPQAWAETGGMGLAVRQAPLIIPLKATSTPVSIKQYPMSQEAKLGIKPHIQRLLDQGILVPCQSPWNTPLLPVKKPGTNDYRPVQDLREVNKRVEDIHPTVPNPYNLLSGLPPSHRWYTVLDLKDAFFCLRLHPTSQPLFAFEWRDPGMGISGQLTWTRLPQGFKNSPTLFNEALHRDLADFRIQHPDLILLQYVDDILLAATSELDCQQGTRALLLTLGNLGYRASAKKAQLCQKQVKYLGYLLKEGQRWLTEARKETVMGQPTPKTPRQLREFLGKAGFCRLFIPGFAEMAAPLYPLTKPGTLFNWGPDQQKAYQEIKQALLTAPALGLPDLTKPFELFVDEKQGYAKGVLTQKLGPWRRPVAYLSKKLDPVAAGWPPCLRMVAAIAVLRKDAGKLTMGQPLVILAPHAVEALVKQPPDRWLSNARMTHYQAMLLDTDRVQFGPVVALNPATLLPLPEEGAPHDCLEILAETHGTRPDLTDQPIPDADHTWYTDGSSFLQEGQRKAGAAVTTETEVIWARALPAGTSAQRAELIALTQALKMAEGKRLNVYTDSRYAFATAHIHGEIYRRRGWLTSEGREIKNKSEILALLKALFLPKRLSIIHCLGHQKGDSAEARGNRLADQAAREAAIKTPPDTSTLLAGKRTADGSEFEKRTADGSEFESPKKKAKVE

SEQ ID NO: 6964 - protein, 2096 aa, synthetic construct
MPAAKRVKLDGGDKKYSIGLDIGTNSVGWAVITDEYKVPSKKFKVLGNTDRHSIKKNLIGALLFDSGETAEATRLKRTARRRYTRRKNRICYLQEIFSNEMAKVDDSFFHRLEESFLVEEDKKHERHPIFGNIVDEVAYHEKYPTIYHLRKKLVDSTDKADLRLIYLALAHMIKFRGHFLIEGDLNPDNSDVDKLFIQLVQTYNQLFEENPINASGVDAKAILSARLSKSRRLENLIAQLPGEKKNGLFGNLIALSLGLTPNFKSNFDLAEDAKLQLSKDTYDDDLDNLLAQIGDQYADLFLAAKNLSDAILLSDILRVNTEITKAPLSASMIKRYDEHHQDLTLLKALVRQQLPEKYKEIFFDQSKNGYAGYIDGGASQEEFYKFIKPILEKMDGTEELLVKLNREDLLRKQRTFDNGSIPHQIHLGELHAILRRQEDFYPFLKDNREKIEKILTFRIPYYVGPLARGNSRFAWMTRKSEETITPWNFEEVVDKGASAQSFIERMTNFDKNLPNEKVLPKHSLLYEYFTVYNELTKVKYVTEGMRKPAFLSGEQKKAIVDLLFKTNRKVTVKQLKEDYFKKIECFDSVEISGVEDRFNASLGTYHDLLKIIKDKDFLDNEENEDILEDIVLTLTLFEDREMIEERLKTYAHLFDDKVMKQLKRRRYTGWGRLSRKLINGIRDKQSGKTILDFLKSDGFANRNFMQLIHDDSLTFKEDIQKAQVSGQGDSLHEHIANLAGSPAIKKGILQTVKVVDELVKVMGRHKPENIVIEMARENQTTQKGQKNSRERMKRIEEGIKELGSQILKEHPVENTQLQNEKLYLYYLQNGRDMYVDQELDINRLSDYDVDHIVPQSFLKDDSIDNKVLTRSDKARGKSDNVPSEEVVKKMKNYWRQLLNAKLITQRKFDNLTKAERGGLSELDKAGFIKRQLVETRQITKHVAQILDSRMNTKYDENDKLIREVKVITLKSKLVSDFRKDFQFYKVREINNYHHAHDAYLNAVVGTALIKKYPKLESEFVYGDYKVYDVRKMIAKSEQEIGKATAKYFFYSNIMNFFKTEITLANGEIRKRPLIETNGETGEIVWDKGRDFATVRKVLSMPQVNIVKKTEVQTGGFSKESILPKRNSDKLIARKKDWDPKKYGGFDSPTVAYSVLVVAKVEKGKSKKLKSVKELLGITIMERSSFEKNPIDFLEAKGYKEVKKDLIIKLPKYSLFELENGRKRMLASAGELQKGNELALPSKYVNFLYLASHYEKLKGSPEDNEQKQLFVEQHKHYLDEIIEQISEFSKRVILADANLDKVLSAYNKHRDKPIREQAENIIHLFTLTNLGAPAAFKYFDTTIDRKRYTSTKEVLDATLIHQSITGLYETRIDLSQLGGDGGEAAAKGGGGGSGGTLGIEDEYRLHETSTEPDVSLGSTWLSDFPQAWAETGGMGLAVRQAPLIIPLKATSTPVSIQQYPMSHEARLGIKPHIQRLLDQGILVPCQSPWNTPLLPVKKPGTNDYRPVQDLREVNKRVEDIHPTVPNPYNLLSGLPPSHQWYTVLDLKDAFFCLRLHPTSQPLFAFEWRDPGMGISGQLTWTRLPQGFKNSPTLFDEALHRDLADFRIQHPDLILLQYVDDILLAATSELDCQQGTRALLQTLGDLGYRASAKKAQICQKQVKYLGYLLREGQRWLTEARKETVMGQPVPKTPRQLREFLGTAGFCRLWIPGFAEMAAPLYPLTKTGTLFSWGPDQQKAYQEIKQALLTAPALGLPDLTKPFELFVDEKQGYAKGVLTQKLGPWRRPVAYLSKKLDPVAAGWPPCLRMVAAIAVLTKDAGKLTMGQPLVILAPHAVEALVKQPPDRWLSNARMTHYQAMLLDTDRVQFGPVVALNPATLLPLPEEGAPHDCLEILAETHGTRPDLTDQPIPDADHTWYTDGSSFLQEGQRKAGAAVTTETEVIWAGALPAGTSAQRAELIALTQALKMAEGKRLNVYTDSRYAFATAHIHGEIYRRRGLLTSEGREIKNKSEILALLKALFLPKRLSIIHCLGHQKGDSAEARGNRLADQAAREAAIKTPPDTSTLLAGKRTADGSEFEKRTADGSEFESPKKKAKVE

SEQ ID NO: 6965 - protein, 2096 aa, synthetic construct
MPAAKRVKLDGGDKKYSIGLDIGTNSVGWAVITDEYKVPSKKFKVLGNTDRHSIKKNLIGALLFDSGETAEATRLKRTARRRYTRRKNRICYLQEIFSNEMAKVDDSFFHRLEESFLVEEDKKHERHPIFGNIVDEVAYHEKYPTIYHLRKKLVDSTDKADLRLIYLALAHMIKFRGHFLIEGDLNPDNSDVDKLFIQLVQTYNQLFEENPINASGVDAKAILSARLSKSRRLENLIAQLPGEKKNGLFGNLIALSLGLTPNFKSNFDLAEDAKLQLSKDTYDDDLDNLLAQIGDQYADLFLAAKNLSDAILLSDILRVNTEITKAPLSASMIKRYDEHHQDLTLLKALVRQQLPEKYKEIFFDQSKNGYAGYIDGGASQEEFYKFIKPILEKMDGTEELLVKLNREDLLRKQRTFDNGSIPHQIHLGELHAILRRQEDFYPFLKDNREKIEKILTFRIPYYVGPLARGNSRFAWMTRKSEETITPWNFEEVVDKGASAQSFIERMTNFDKNLPNEKVLPKHSLLYEYFTVYNELTKVKYVTEGMRKPAFLSGEQKKAIVDLLFKTNRKVTVKQLKEDYFKKIECFDSVEISGVEDRFNASLGTYHDLLKIIKDKDFLDNEENEDILEDIVLTLTLFEDREMIEERLKTYAHLFDDKVMKQLKRRRYTGWGRLSRKLINGIRDKQSGKTILDFLKSDGFANRNFMQLIHDDSLTFKEDIQKAQVSGQGDSLHEHIANLAGSPAIKKGILQTVKVVDELVKVMGRHKPENIVIEMARENQTTQKGQKNSRERMKRIEEGIKELGSQILKEHPVENTQLQNEKLYLYYLQNGRDMYVDQELDINRLSDYDVDHIVPQSFLKDDSIDNKVLTRSDKARGKSDNVPSEEVVKKMKNYWRQLLNAKLITQRKFDNLTKAERGGLSELDKAGFIKRQLVETRQITKHVAQILDSRMNTKYDENDKLIREVKVITLKSKLVSDFRKDFQFYKVREINNYHHAHDAYLNAVVGTALIKKYPKLESEFVYGDYKVYDVRKMIAKSEQEIGKATAKYFFYSNIMNFFKTEITLANGEIRKRPLIETNGETGEIVWDKGRDFATVRKVLSMPQVNIVKKTEVQTGGFSKESILPKRNSDKLIARKKDWDPKKYGGFDSPTVAYSVLVVAKVEKGKSKKLKSVKELLGITIMERSSFEKNPIDFLEAKGYKEVKKDLIIKLPKYSLFELENGRKRMLASAGELQKGNELALPSKYVNFLYLASHYEKLKGSPEDNEQKQLFVEQHKHYLDEIIEQISEFSKRVILADANLDKVLSAYNKHRDKPIREQAENIIHLFTLTNLGAPAAFKYFDTTIDRKRYTSTKEVLDATLIHQSITGLYETRIDLSQLGGDGGEAAAKGGGGGSGGTLNIEDEYRLHETSKGPDVPLGSTWLSDFPQAWAETGGMGLAVRQAPLIIPLKATSTPVSIKQYPMSQEARLGIKPHIQRLLDQGILVPCQSPWNTPLLPVKKPGTNDYRPVQDLREVNKRVEDIHPTVPNPYNLLSGLPPSHQWYTVLDLKDAFFCLRLHPTSQSLFAFEWRDPEMGISGQLTWTRLPQGFKNSPTLFDEALHRDLADFRIQHPDLILLQYVDDLLLAATSELDCQQGTRALLQTLGDLGYRASAKKAQICQKQVKYLGYLLKEGQRWLTEARKETVMGQPTPKTPRQLREFLGTAGFCRLWIPGFAEMAAPLYPLTKTGTLFEWGPDQQKAYQEIKQALLTAPALGLPDLTKPFELFVDEKQGYAKGVLTQKLGPWRRPVAYLSKKLDPVAAGWPPCLRMVAAIAVLTKDAGKLTMGQPLVILAPHAVEALVKQPPDRWLSNARMTHYQALLLDTDRVQFGPIVALNPATLLPLPEEGLQHDCLDILAEAHGTRPDLTDQPLPDADHTWYTDGSSFLQEGQRKAGAAVTTETEVVWAKALPAGTSAQRAELIALTQALKMAEGKKLNVYTDSRYAFATAHIHGEIYRRRGLLTSEGKEIKNKDEILALLKALFLPKRLSIIHCPGHQKGNRAEARGNRMADQAAREVATRETPETSTLLAGKRTADGSEFEKRTADGSEFESPKKKAKVE

SEQ ID NO: 6966 - protein, 2087 aa, synthetic construct
MPAAKRVKLDGGDKKYSIGLDIGTNSVGWAVITDEYKVPSKKFKVLGNTDRHSIKKNLIGALLFDSGETAEATRLKRTARRRYTRRKNRICYLQEIFSNEMAKVDDSFFHRLEESFLVEEDKKHERHPIFGNIVDEVAYHEKYPTIYHLRKKLVDSTDKADLRLIYLALAHMIKFRGHFLIEGDLNPDNSDVDKLFIQLVQTYNQLFEENPINASGVDAKAILSARLSKSRRLENLIAQLPGEKKNGLFGNLIALSLGLTPNFKSNFDLAEDAKLQLSKDTYDDDLDNLLAQIGDQYADLFLAAKNLSDAILLSDILRVNTEITKAPLSASMIKRYDEHHQDLTLLKALVRQQLPEKYKEIFFDQSKNGYAGYIDGGASQEEFYKFIKPILEKMDGTEELLVKLNREDLLRKQRTFDNGSIPHQIHLGELHAILRRQEDFYPFLKDNREKIEKILTFRIPYYVGPLARGNSRFAWMTRKSEETITPWNFEEVVDKGASAQSFIERMTNFDKNLPNEKVLPKHSLLYEYFTVYNELTKVKYVTEGMRKPAFLSGEQKKAIVDLLFKTNRKVTVKQLKEDYFKKIECFDSVEISGVEDRFNASLGTYHDLLKIIKDKDFLDNEENEDILEDIVLTLTLFEDREMIEERLKTYAHLFDDKVMKQLKRRRYTGWGRLSRKLINGIRDKQSGKTILDFLKSDGFANRNFMQLIHDDSLTFKEDIQKAQVSGQGDSLHEHIANLAGSPAIKKGILQTVKVVDELVKVMGRHKPENIVIEMARENQTTQKGQKNSRERMKRIEEGIKELGSQILKEHPVENTQLQNEKLYLYYLQNGRDMYVDQELDINRLSDYDVDHIVPQSFLKDDSIDNKVLTRSDKARGKSDNVPSEEVVKKMKNYWRQLLNAKLITQRKFDNLTKAERGGLSELDKAGFIKRQLVETRQITKHVAQILDSRMNTKYDENDKLIREVKVITLKSKLVSDFRKDFQFYKVREINNYHHAHDAYLNAVVGTALIKKYPKLESEFVYGDYKVYDVRKMIAKSEQEIGKATAKYFFYSNIMNFFKTEITLANGEIRKRPLIETNGETGEIVWDKGRDFATVRKVLSMPQVNIVKKTEVQTGGFSKESILPKRNSDKLIARKKDWDPKKYGGFDSPTVAYSVLVVAKVEKGKSKKLKSVKELLGITIMERSSFEKNPIDFLEAKGYKEVKKDLIIKLPKYSLFELENGRKRMLASAGELQKGNELALPSKYVNFLYLASHYEKLKGSPEDNEQKQLFVEQHKHYLDEIIEQISEFSKRVILADANLDKVLSAYNKHRDKPIREQAENIIHLFTLTNLGAPAAFKYFDTTIDRKRYTSTKEVLDATLIHQSITGLYETRIDLSQLGGDGGEAAAKGGGGGSGGIPWLMKKPLQLTTLVPLQEYEERLLKQTMLTGSYKEKLQSLFLKYDALWQHWENQVGHRRIKPHHIATGTVNPRPQKQYPINPKAKASIQTVINDLLKQGVLIQQNSIMNTPVYPVPKPDGKWRMVLDYREVNKTIPLIAAQNQHSAGILSSIFRGKYKTTLDLSNGFWAHSITPESYWLTAFTWLGQQYCWTRLPQGFLNSPALFNADVVDLLKEVPNVQVYVDDIYISHDDPREHLEQLEKVFSLLLNAGYVVSLKKSEIAQHEVEFLGFNITKEGRGLTETFKQKLLNITPPRDLKQLQSILGLLNFARNFIPNFSELVKPLYNIIATAPGKYITWTTDNSQQLQNIISMLNSAENLEERNPEVRLIMKVNTSPSAGYIRFYNEFAKRPIMYLNYVYTKAEVKFTNTEKLLTTIHKGLIKALDLGMGQEILVYSPIVSMTKIQKTPLPERKALPIRWITWMSYLEDPRIQFHYDKTLPELQQVPTVTDDIIAKIKHPSEFSMVFYTDGSAIKHPNVNKSHNAGMGIAQVQFKPEFTVINTWSIPLGDHTAQLAEVAAVEFACKKALKIDGPVLIVTDSFYVAESVNKELPYWQSNGFFNNKKKPLKHVSKWKSIADCIQLKPDIIIIHEKGHQPTASTFHTEGNNLADKLATQGSYVVNAGKRTADGSEFEKRTADGSEFESPKKKAKVE

SEQ ID NO: 6967 - protein, 2087 aa, synthetic construct
MPAAKRVKLDGGDKKYSIGLDIGTNSVGWAVITDEYKVPSKKFKVLGNTDRHSIKKNLIGALLFDSGETAEATRLKRTARRRYTRRKNRICYLQEIFSNEMAKVDDSFFHRLEESFLVEEDKKHERHPIFGNIVDEVAYHEKYPTIYHLRKKLVDSTDKADLRLIYLALAHMIKFRGHFLIEGDLNPDNSDVDKLFIQLVQTYNQLFEENPINASGVDAKAILSARLSKSRRLENLIAQLPGEKKNGLFGNLIALSLGLTPNFKSNFDLAEDAKLQLSKDTYDDDLDNLLAQIGDQYADLFLAAKNLSDAILLSDILRVNTEITKAPLSASMIKRYDEHHQDLTLLKALVRQQLPEKYKEIFFDQSKNGYAGYIDGGASQEEFYKFIKPILEKMDGTEELLVKLNREDLLRKQRTFDNGSIPHQIHLGELHAILRRQEDFYPFLKDNREKIEKILTFRIPYYVGPLARGNSRFAWMTRKSEETITPWNFEEVVDKGASAQSFIERMTNFDKNLPNEKVLPKHSLLYEYFTVYNELTKVKYVTEGMRKPAFLSGEQKKAIVDLLFKTNRKVTVKQLKEDYFKKIECFDSVEISGVEDRFNASLGTYHDLLKIIKDKDFLDNEENEDILEDIVLTLTLFEDREMIEERLKTYAHLFDDKVMKQLKRRRYTGWGRLSRKLINGIRDKQSGKTILDFLKSDGFANRNFMQLIHDDSLTFKEDIQKAQVSGQGDSLHEHIANLAGSPAIKKGILQTVKVVDELVKVMGRHKPENIVIEMARENQTTQKGQKNSRERMKRIEEGIKELGSQILKEHPVENTQLQNEKLYLYYLQNGRDMYVDQELDINRLSDYDVDHIVPQSFLKDDSIDNKVLTRSDKARGKSDNVPSEEVVKKMKNYWRQLLNAKLITQRKFDNLTKAERGGLSELDKAGFIKRQLVETRQITKHVAQILDSRMNTKYDENDKLIREVKVITLKSKLVSDFRKDFQFYKVREINNYHHAHDAYLNAVVGTALIKKYPKLESEFVYGDYKVYDVRKMIAKSEQEIGKATAKYFFYSNIMNFFKTEITLANGEIRKRPLIETNGETGEIVWDKGRDFATVRKVLSMPQVNIVKKTEVQTGGFSKESILPKRNSDKLIARKKDWDPKKYGGFDSPTVAYSVLVVAKVEKGKSKKLKSVKELLGITIMERSSFEKNPIDFLEAKGYKEVKKDLIIKLPKYSLFELENGRKRMLASAGELQKGNELALPSKYVNFLYLASHYEKLKGSPEDNEQKQLFVEQHKHYLDEIIEQISEFSKRVILADANLDKVLSAYNKHRDKPIREQAENIIHLFTLTNLGAPAAFKYFDTTIDRKRYTSTKEVLDATLIHQSITGLYETRIDLSQLGGDGGEAAAKGGGGGSGGIPWLMKKPLQLTTLVPLQEYEERLLKQTMLTGSYKEKLQSLFLKYDALWQHWENQVGHRRIKPHHIATGTVNPRPQKQYPINPKAKASIQTVINDLLKQGVLIQQNSIMNTPVYPVPKPDGKWRMVLDYREVNKTIPLIAAQNQHSAGILSSIFRGKYKTTLDLSNGFWAHSITPESYWLTAFTWLGQQYCWTRLPQGFLNSPALFNADVVDLLKEVPNVQVYVDDIYISHDDPREHLEQLEKVFSLLLNAGYVVSLKKSEIAQHEVEFLGFNITKEGRGLTETFKQKLLNITPPRDLKQLQSILGKLNFARNFIPNFSELVKPLYNIIATAPGKYITWTTDNSQQLQNIISMLNSAENLEERNPEVRLIMKVNTSPSAGYIRFYNEFAKRPIMYLNYVYTKAEVKFTNTEKLLTTIHKGLIKALDLGMGQEILVYSPIVSMTKIQKTPLPERKALPIRWITWMSYLEDPRIQFHYDKTLPELQQVPTVTDDIIAKIKHPSEFSMVFYTDGSAIKHPNVNKSHNAGMGIAQVQFKPEFTVINTWSIPLGDHTAQLAEVAAVEFACKKALKIDGPVLIVTDSFYVAESVNKELPYWQSNGFFNNKKKPLKHVSKWKSIADCIQLKPDIIIIHEKGHQPTASTFHTEGNNLADKLATQGSYVVNAGKRTADGSEFEKRTADGSEFESPKKKAKVE

SEQ ID NO: 6968 - protein, 2094 aa, synthetic construct
MPAAKRVKLDGGDKKYSIGLDIGTNSVGWAVITDEYKVPSKKFKVLGNTDRHSIKKNLIGALLFDSGETAEATRLKRTARRRYTRRKNRICYLQEIFSNEMAKVDDSFFHRLEESFLVEEDKKHERHPIFGNIVDEVAYHEKYPTIYHLRKKLVDSTDKADLRLIYLALAHMIKFRGHFLIEGDLNPDNSDVDKLFIQLVQTYNQLFEENPINASGVDAKAILSARLSKSRRLENLIAQLPGEKKNGLFGNLIALSLGLTPNFKSNFDLAEDAKLQLSKDTYDDDLDNLLAQIGDQYADLFLAAKNLSDAILLSDILRVNTEITKAPLSASMIKRYDEHHQDLTLLKALVRQQLPEKYKEIFFDQSKNGYAGYIDGGASQEEFYKFIKPILEKMDGTEELLVKLNREDLLRKQRTFDNGSIPHQIHLGELHAILRRQEDFYPFLKDNREKIEKILTFRIPYYVGPLARGNSRFAWMTRKSEETITPWNFEEVVDKGASAQSFIERMTNFDKNLPNEKVLPKHSLLYEYFTVYNELTKVKYVTEGMRKPAFLSGEQKKAIVDLLFKTNRKVTVKQLKEDYFKKIECFDSVEISGVEDRFNASLGTYHDLLKIIKDKDFLDNEENEDILEDIVLTLTLFEDREMIEERLKTYAHLFDDKVMKQLKRRRYTGWGRLSRKLINGIRDKQSGKTILDFLKSDGFANRNFMQLIHDDSLTFKEDIQKAQVSGQGDSLHEHIANLAGSPAIKKGILQTVKVVDELVKVMGRHKPENIVIEMARENQTTQKGQKNSRERMKRIEEGIKELGSQILKEHPVENTQLQNEKLYLYYLQNGRDMYVDQELDINRLSDYDVDHIVPQSFLKDDSIDNKVLTRSDKARGKSDNVPSEEVVKKMKNYWRQLLNAKLITQRKFDNLTKAERGGLSELDKAGFIKRQLVETRQITKHVAQILDSRMNTKYDENDKLIREVKVITLKSKLVSDFRKDFQFYKVREINNYHHAHDAYLNAVVGTALIKKYPKLESEFVYGDYKVYDVRKMIAKSEQEIGKATAKYFFYSNIMNFFKTEITLANGEIRKRPLIETNGETGEIVWDKGRDFATVRKVLSMPQVNIVKKTEVQTGGFSKESILPKRNSDKLIARKKDWDPKKYGGFDSPTVAYSVLVVAKVEKGKSKKLKSVKELLGITIMERSSFEKNPIDFLEAKGYKEVKKDLIIKLPKYSLFELENGRKRMLASAGELQKGNELALPSKYVNFLYLASHYEKLKGSPEDNEQKQLFVEQHKHYLDEIIEQISEFSKRVILADANLDKVLSAYNKHRDKPIREQAENIIHLFTLTNLGAPAAFKYFDTTIDRKRYTSTKEVLDATLIHQSITGLYETRIDLSQLGGDGGEAAAKGGGGGSGGVLNLEEEYRLHEKPVPSSIDPSWLQLFPTVWAERAGMGLANQVPPVVVELRSGASPVAVRQYPMSKEAREGIRPHIQRFLDLGVLVPCQSPWNTPLLPVKKPGTNDYRPVQDLREINKRVQDIHPTVPNPYNLLSSLPPSHTWYSVLDLKDAFFCLKLHPNSQPLFAFEWRDPEKGNTGQLTWTRLPQGFKNSPTLFNEALHRDLAPFRALNPQVVLLQYVDDLLVAAPTYRDCKEGTQKLLQELSKLGYRVSAKKAQLCQKEVTYLGYLLKEGKRWLTPARKATVMKIPPPTTPRQVREFLGKAGFCRLFIPGFASLAAPLYPLTKPSIPFIWTEEHQKAFDRIKEALLSAPALALPDLTKPFTLYVDERAGVARGVLTQTLGPWRRPVAYLSKKLDPVASGWPTCLKAVAAVALLLKDADKLTLGQNVTVIASHSLESIVRQPPDRWMTNARMTHYQSLLLNERVSFAPPAVLNPATLLPVESEATPVHRCSEILAEETGTRRDLKDQPLPGVPAWYTDGSSFIAEGKRRAGAAIVDGKRTVWASSLPEGTSAQKAELVALTQALRLAEGKDINIYTDSRYAFATAHIHGAIYKQRGWLTSAGKDIKNKEEILALLEAIHLPKRVAIIHCPGHQKGNDPVATGNRRADEAAKQAALSTRVLAETTKPAGKRTADGSEFEKRTADGSEFESPKKKAKVE

SEQ ID NO: 6969 - protein, 2096 aa, synthetic construct
MPAAKRVKLDGGDKKYSIGLDIGTNSVGWAVITDEYKVPSKKFKVLGNTDRHSIKKNLIGALLFDSGETAEATRLKRTARRRYTRRKNRICYLQEIFSNEMAKVDDSFFHRLEESFLVEEDKKHERHPIFGNIVDEVAYHEKYPTIYHLRKKLVDSTDKADLRLIYLALAHMIKFRGHFLIEGDLNPDNSDVDKLFIQLVQTYNQLFEENPINASGVDAKAILSARLSKSRRLENLIAQLPGEKKNGLFGNLIALSLGLTPNFKSNFDLAEDAKLQLSKDTYDDDLDNLLAQIGDQYADLFLAAKNLSDAILLSDILRVNTEITKAPLSASMIKRYDEHHQDLTLLKALVRQQLPEKYKEIFFDQSKNGYAGYIDGGASQEEFYKFIKPILEKMDGTEELLVKLNREDLLRKQRTFDNGSIPHQIHLGELHAILRRQEDFYPFLKDNREKIEKILTFRIPYYVGPLARGNSRFAWMTRKSEETITPWNFEEVVDKGASAQSFIERMTNFDKNLPNEKVLPKHSLLYEYFTVYNELTKVKYVTEGMRKPAFLSGEQKKAIVDLLFKTNRKVTVKQLKEDYFKKIECFDSVEISGVEDRFNASLGTYHDLLKIIKDKDFLDNEENEDILEDIVLTLTLFEDREMIEERLKTYAHLFDDKVMKQLKRRRYTGWGRLSRKLINGIRDKQSGKTILDFLKSDGFANRNFMQLIHDDSLTFKEDIQKAQVSGQGDSLHEHIANLAGSPAIKKGILQTVKVVDELVKVMGRHKPENIVIEMARENQTTQKGQKNSRERMKRIEEGIKELGSQILKEHPVENTQLQNEKLYLYYLQNGRDMYVDQELDINRLSDYDVDHIVPQSFLKDDSIDNKVLTRSDKARGKSDNVPSEEVVKKMKNYWRQLLNAKLITQRKFDNLTKAERGGLSELDKAGFIKRQLVETRQITKHVAQILDSRMNTKYDENDKLIREVKVITLKSKLVSDFRKDFQFYKVREINNYHHAHDAYLNAVVGTALIKKYPKLESEFVYGDYKVYDVRKMIAKSEQEIGKATAKYFFYSNIMNFFKTEITLANGEIRKRPLIETNGETGEIVWDKGRDFATVRKVLSMPQVNIVKKTEVQTGGFSKESILPKRNSDKLIARKKDWDPKKYGGFDSPTVAYSVLVVAKVEKGKSKKLKSVKELLGITIMERSSFEKNPIDFLEAKGYKEVKKDLIIKLPKYSLFELENGRKRMLASAGELQKGNELALPSKYVNFLYLASHYEKLKGSPEDNEQKQLFVEQHKHYLDEIIEQISEFSKRVILADANLDKVLSAYNKHRDKPIREQAENIIHLFTLTNLGAPAAFKYFDTTIDRKRYTSTKEVLDATLIHQSITGLYETRIDLSQLGGDGGEAAAKGGGGGSGGTLNIEDEYRLHETSKEPDVPLGSTWLSDFPQAWAETGGMGLAVRQAPLIIPLKATSTPVSIKQYPMSQEARLGIKPHIQRLLDQGILVPCQSPWNTPLLPVKKPGTNDYRPVQDLREVNKRVEDIHPTVPNPYNLLSGLPPSHQWYTVLDLKDAFFCLRLHPTSQPLFAFEWRDPEMGISGQLTWTRLPQGFKNSPTLFNEALHRDLADFRIQHPDLILLQYVDDLLLAATSEQDCQRGTRALLQTLGNLGYRASAKKAQICQKQVKYLGYLLKEGQRWLTEARKETVMGQPTPKTPRQLREFLGTAGFCRLWIPGFAEMAAPLYPLTKPGTLFNWGPDQQKAYQEIKQALLTAPALGLPDLTKPFELFVDEKQGYAKGVLTQKLGPWRRPVAYLSKKLDPVAAGWPPCLRMVAAIAVLTKDAGKLTMGQPLVILAPHAVEALVKQPPDRWLSNARMTHYQAMLLDTDRVQFGPVVALNPATLLPLPEKEAPHDCLEILAETHGTRPDLTDQPIPDADYTWYTDGSSFLQEGQRRAGAAVTTETEVIWARALPAGTSAQRAELIALTQALKMAEGKKLNVYTDSRYAFATAHVHGEIYRRRGWLTSEGREIKNKNEILALLKALFLPKRLSIIHCPGHQKGNSAEARGNRMADQAAREAAMKAVLETSTLLAGKRTADGSEFEKRTADGSEFESPKKKAKVE

SEQ ID NO: 6970 - protein, 2096 aa, synthetic construct
MPAAKRVKLDGGDKKYSIGLDIGTNSVGWAVITDEYKVPSKKFKVLGNTDRHSIKKNLIGALLFDSGETAEATRLKRTARRRYTRRKNRICYLQEIFSNEMAKVDDSFFHRLEESFLVEEDKKHERHPIFGNIVDEVAYHEKYPTIYHLRKKLVDSTDKADLRLIYLALAHMIKFRGHFLIEGDLNPDNSDVDKLFIQLVQTYNQLFEENPINASGVDAKAILSARLSKSRRLENLIAQLPGEKKNGLFGNLIALSLGLTPNFKSNFDLAEDAKLQLSKDTYDDDLDNLLAQIGDQYADLFLAAKNLSDAILLSDILRVNTEITKAPLSASMIKRYDEHHQDLTLLKALVRQQLPEKYKEIFFDQSKNGYAGYIDGGASQEEFYKFIKPILEKMDGTEELLVKLNREDLLRKQRTFDNGSIPHQIHLGELHAILRRQEDFYPFLKDNREKIEKILTFRIPYYVGPLARGNSRFAWMTRKSEETITPWNFEEVVDKGASAQSFIERMTNFDKNLPNEKVLPKHSLLYEYFTVYNELTKVKYVTEGMRKPAFLSGEQKKAIVDLLFKTNRKVTVKQLKEDYFKKIECFDSVEISGVEDRFNASLGTYHDLLKIIKDKDFLDNEENEDILEDIVLTLTLFEDREMIEERLKTYAHLFDDKVMKQLKRRRYTGWGRLSRKLINGIRDKQSGKTILDFLKSDGFANRNFMQLIHDDSLTFKEDIQKAQVSGQGDSLHEHIANLAGSPAIKKGILQTVKVVDELVKVMGRHKPENIVIEMARENQTTQKGQKNSRERMKRIEEGIKELGSQILKEHPVENTQLQNEKLYLYYLQNGRDMYVDQELDINRLSDYDVDHIVPQSFLKDDSIDNKVLTRSDKARGKSDNVPSEEVVKKMKNYWRQLLNAKLITQRKFDNLTKAERGGLSELDKAGFIKRQLVETRQITKHVAQILDSRMNTKYDENDKLIREVKVITLKSKLVSDFRKDFQFYKVREINNYHHAHDAYLNAVVGTALIKKYPKLESEFVYGDYKVYDVRKMIAKSEQEIGKATAKYFFYSNIMNFFKTEITLANGEIRKRPLIETNGETGEIVWDKGRDFATVRKVLSMPQVNIVKKTEVQTGGFSKESILPKRNSDKLIARKKDWDPKKYGGFDSPTVAYSVLVVAKVEKGKSKKLKSVKELLGITIMERSSFEKNPIDFLEAKGYKEVKKDLIIKLPKYSLFELENGRKRMLASAGELQKGNELALPSKYVNFLYLASHYEKLKGSPEDNEQKQLFVEQHKHYLDEIIEQISEFSKRVILADANLDKVLSAYNKHRDKPIREQAENIIHLFTLTNLGAPAAFKYFDTTIDRKRYTSTKEVLDATLIHQSITGLYETRIDLSQLGGDGGGGSGGGPAPGGTAPLEEEYRLFLEAPIQNVTLLEQWKREIPKVWAEINPPGLASTQAPIHVQLLSTALPVRVRQYPITLEAKRSLRETIRKFRAAGILRPVHSPWNTPLLPVRKSGTSEYRMVQDLREVNKRVETIHPTVPNPYTLLSLLPPDRIWYSVLDLKDAFFCIPLAPESQLIFAFEWADAEEGESGQLTWTRLPQGFKNSPTLFDEALNRDLQGFRLDHPSVSLLQYVDDLLIAADTQAACLSATRDLLMTLAELGYRVSGKKAQLCQEEVTYLGFKIHKGSRSLSNSRTQAILQIPVPKTKRQVREFLGTIGYCRLWIPGFAELAQPLYAATRGGNDPLVWGEKEEEAFQSLKLALTQPPALALPSLDKPFQLFVEETSGAAKGVLTQALGPWKRPVAYLSKRLDPVAAGWPRCLRAIAAAALLTREASKLTFGQDIEITSSHNLESLLRSPPDKWLTNARITQYQVLLLDPPRVRFKQTAALNPATLLPETDDTLPIHHCLDTLDSLTSTRPDLTDQPLAQAEATLFTDGSSYIRDGKRYAGAAVVTLDSVIWAEPLPIGTSAQKAELIALTKALEWSKDKSVNIYTDSRYAFATLHVHGMIYRERGLLTAGGKAIKNAPEILALLTAVWLPKRVAVMHCKGHQKDDAPTSTGNRRADEVAREVAIRPLSTQATISAGKRTADGSEFEKRTADGSEFESPKKKAKVE

SEQ ID NO: 6971 - protein, 2096 aa, synthetic construct
MPAAKRVKLDGGDKKYSIGLDIGTNSVGWAVITDEYKVPSKKFKVLGNTDRHSIKKNLIGALLFDSGETAEATRLKRTARRRYTRRKNRICYLQEIFSNEMAKVDDSFFHRLEESFLVEEDKKHERHPIFGNIVDEVAYHEKYPTIYHLRKKLVDSTDKADLRLIYLALAHMIKFRGHFLIEGDLNPDNSDVDKLFIQLVQTYNQLFEENPINASGVDAKAILSARLSKSRRLENLIAQLPGEKKNGLFGNLIALSLGLTPNFKSNFDLAEDAKLQLSKDTYDDDLDNLLAQIGDQYADLFLAAKNLSDAILLSDILRVNTEITKAPLSASMIKRYDEHHQDLTLLKALVRQQLPEKYKEIFFDQSKNGYAGYIDGGASQEEFYKFIKPILEKMDGTEELLVKLNREDLLRKQRTFDNGSIPHQIHLGELHAILRRQEDFYPFLKDNREKIEKILTFRIPYYVGPLARGNSRFAWMTRKSEETITPWNFEEVVDKGASAQSFIERMTNFDKNLPNEKVLPKHSLLYEYFTVYNELTKVKYVTEGMRKPAFLSGEQKKAIVDLLFKTNRKVTVKQLKEDYFKKIECFDSVEISGVEDRFNASLGTYHDLLKIIKDKDFLDNEENEDILEDIVLTLTLFEDREMIEERLKTYAHLFDDKVMKQLKRRRYTGWGRLSRKLINGIRDKQSGKTILDFLKSDGFANRNFMQLIHDDSLTFKEDIQKAQVSGQGDSLHEHIANLAGSPAIKKGILQTVKVVDELVKVMGRHKPENIVIEMARENQTTQKGQKNSRERMKRIEEGIKELGSQILKEHPVENTQLQNEKLYLYYLQNGRDMYVDQELDINRLSDYDVDHIVPQSFLKDDSIDNKVLTRSDKARGKSDNVPSEEVVKKMKNYWRQLLNAKLITQRKFDNLTKAERGGLSELDKAGFIKRQLVETRQITKHVAQILDSRMNTKYDENDKLIREVKVITLKSKLVSDFRKDFQFYKVREINNYHHAHDAYLNAVVGTALIKKYPKLESEFVYGDYKVYDVRKMIAKSEQEIGKATAKYFFYSNIMNFFKTEITLANGEIRKRPLIETNGETGEIVWDKGRDFATVRKVLSMPQVNIVKKTEVQTGGFSKESILPKRNSDKLIARKKDWDPKKYGGFDSPTVAYSVLVVAKVEKGKSKKLKSVKELLGITIMERSSFEKNPIDFLEAKGYKEVKKDLIIKLPKYSLFELENGRKRMLASAGELQKGNELALPSKYVNFLYLASHYEKLKGSPEDNEQKQLFVEQHKHYLDEIIEQISEFSKRVILADANLDKVLSAYNKHRDKPIREQAENIIHLFTLTNLGAPAAFKYFDTTIDRKRYTSTKEVLDATLIHQSITGLYETRIDLSQLGGDGGGGSGGGPAPGGTAPLEEEYRLFLEAPIQNVTLLEQWKREIPKVWAEINPPGLASTQAPIHVQLLSTALPVRVRQYPITLEAKRSLRETIRKFRAAGILRPVHSPWNTPLLPVRKSGTSEYRMVQDLREVNKRVETIHPTVPNPYTLLSLLPPDRIWYSVLDLKDAFFCIPLAPESQLIFAFEWADAEEGESGQLTWTRLPQGFKNSPTLFNEALNRDLQGFRLDHPSVSLLQYVDDLLIAADTQAACLSATRDLLMTLAELGYRVSGKKAQLCQEEVTYLGFKIHKGSRSLSNSRTQAILQIPVPKTKRQVREFLGTIGYCRLWIPGFAELAQPLYAATRPGNDPLVWGEKEEEAFQSLKLALTQPPALALPSLDKPFQLFVEETSGAAKGVLTQALGPWKRPVAYLSKRLDPVAAGWPRCLRAIAAAALLTREASKLTFGQDIEITSSHNLESLLRSPPDKWLTNARITQYQVLLLDPPRVRFKQTAALNPATLLPETDDTLPIHHCLDTLDSLTSTRPDLTDQPLAQAEATLFTDGSSYIRDGKRYAGAAVVTLDSVIWAEPLPIGTSAQKAELIALTKALEWSKDKSVNIYTDSRYAFATLHVHGMIYRERGWLTAGGKAIKNAPEILALLTAVWLPKRVAVMHCKGHQKDDAPTSTGNRRADEVAREVAIRPLSTQATISAGKRTADGSEFEKRTADGSEFESPKKKAKVE

SEQ ID NO: 6972 - protein, 2096 aa, synthetic construct
MPAAKRVKLDGGDKKYSIGLDIGTNSVGWAVITDEYKVPSKKFKVLGNTDRHSIKKNLIGALLFDSGETAEATRLKRTARRRYTRRKNRICYLQEIFSNEMAKVDDSFFHRLEESFLVEEDKKHERHPIFGNIVDEVAYHEKYPTIYHLRKKLVDSTDKADLRLIYLALAHMIKFRGHFLIEGDLNPDNSDVDKLFIQLVQTYNQLFEENPINASGVDAKAILSARLSKSRRLENLIAQLPGEKKNGLFGNLIALSLGLTPNFKSNFDLAEDAKLQLSKDTYDDDLDNLLAQIGDQYADLFLAAKNLSDAILLSDILRVNTEITKAPLSASMIKRYDEHHQDLTLLKALVRQQLPEKYKEIFFDQSKNGYAGYIDGGASQEEFYKFIKPILEKMDGTEELLVKLNREDLLRKQRTFDNGSIPHQIHLGELHAILRRQEDFYPFLKDNREKIEKILTFRIPYYVGPLARGNSRFAWMTRKSEETITPWNFEEVVDKGASAQSFIERMTNFDKNLPNEKVLPKHSLLYEYFTVYNELTKVKYVTEGMRKPAFLSGEQKKAIVDLLFKTNRKVTVKQLKEDYFKKIECFDSVEISGVEDRFNASLGTYHDLLKIIKDKDFLDNEENEDILEDIVLTLTLFEDREMIEERLKTYAHLFDDKVMKQLKRRRYTGWGRLSRKLINGIRDKQSGKTILDFLKSDGFANRNFMQLIHDDSLTFKEDIQKAQVSGQGDSLHEHIANLAGSPAIKKGILQTVKVVDELVKVMGRHKPENIVIEMARENQTTQKGQKNSRERMKRIEEGIKELGSQILKEHPVENTQLQNEKLYLYYLQNGRDMYVDQELDINRLSDYDVDHIVPQSFLKDDSIDNKVLTRSDKARGKSDNVPSEEVVKKMKNYWRQLLNAKLITQRKFDNLTKAERGGLSELDKAGFIKRQLVETRQITKHVAQILDSRMNTKYDENDKLIREVKVITLKSKLVSDFRKDFQFYKVREINNYHHAHDAYLNAVVGTALIKKYPKLESEFVYGDYKVYDVRKMIAKSEQEIGKATAKYFFYSNIMNFFKTEITLANGEIRKRPLIETNGETGEIVWDKGRDFATVRKVLSMPQVNIVKKTEVQTGGFSKESILPKRNSDKLIARKKDWDPKKYGGFDSPTVAYSVLVVAKVEKGKSKKLKSVKELLGITIMERSSFEKNPIDFLEAKGYKEVKKDLIIKLPKYSLFELENGRKRMLASAGELQKGNELALPSKYVNFLYLASHYEKLKGSPEDNEQKQLFVEQHKHYLDEIIEQISEFSKRVILADANLDKVLSAYNKHRDKPIREQAENIIHLFTLTNLGAPAAFKYFDTTIDRKRYTSTKEVLDATLIHQSITGLYETRIDLSQLGGDGGGGSGGGPAPGGTAPLEEEYRLFLEAPIQNVTLLEQWKREIPKVWAEINPPGLASTQAPIHVQLLSTALPVRVRQYPITLEAKRSLRETIRKFRAAGILRPVHSPWNTPLLPVRKSGTSEYRMVQDLREVNKRVETIHPTVPNPYTLLSLLPPDRIWYSVLDLKDAFFCIPLAPESQLIFAFEWADAEEGESGQLTWTRLPQGFKNSPTLFNEALNRDLQGFRLDHPSVSLLQYVDDLLIAADTQAACLSATRDLLMTLAELGYRVSGKKAQLCQEEVTYLGFKIHKGSRSLSNSRTQAILQIPVPKTKRQVREFLGKIGYCRLFIPGFAELAQPLYAATRPGNDPLVWGEKEEEAFQSLKLALTQPPALALPSLDKPFQLFVEETSGAAKGVLTQALGPWKRPVAYLSKRLDPVAAGWPRCLRAIAAAALLTREASKLTFGQDIEITSSHNLESLLRSPPDKWLTNARITQYQVLLLDPPRVRFKQTAALNPATLLPETDDTLPIHHCLDTLDSLTSTRPDLTDQPLAQAEATLFTDGSSYIRDGKRYAGAAVVTLDSVIWAEPLPIGTSAQKAELIALTKALEWSKDKSVNIYTDSRYAFATLHVHGMIYRERGWLTAGGKAIKNAPEILALLTAVWLPKRVAVMHCKGHQKDDAPTSTGNRRADEVAREVAIRPLSTQATISAGKRTADGSEFEKRTADGSEFESPKKKAKVE

SEQ ID NO: 6973 - protein, 2100 aa, synthetic construct
MPAAKRVKLDGGDKKYSIGLDIGTNSVGWAVITDEYKVPSKKFKVLGNTDRHSIKKNLIGALLFDSGETAEATRLKRTARRRYTRRKNRICYLQEIFSNEMAKVDDSFFHRLEESFLVEEDKKHERHPIFGNIVDEVAYHEKYPTIYHLRKKLVDSTDKADLRLIYLALAHMIKFRGHFLIEGDLNPDNSDVDKLFIQLVQTYNQLFEENPINASGVDAKAILSARLSKSRRLENLIAQLPGEKKNGLFGNLIALSLGLTPNFKSNFDLAEDAKLQLSKDTYDDDLDNLLAQIGDQYADLFLAAKNLSDAILLSDILRVNTEITKAPLSASMIKRYDEHHQDLTLLKALVRQQLPEKYKEIFFDQSKNGYAGYIDGGASQEEFYKFIKPILEKMDGTEELLVKLNREDLLRKQRTFDNGSIPHQIHLGELHAILRRQEDFYPFLKDNREKIEKILTFRIPYYVGPLARGNSRFAWMTRKSEETITPWNFEEVVDKGASAQSFIERMTNFDKNLPNEKVLPKHSLLYEYFTVYNELTKVKYVTEGMRKPAFLSGEQKKAIVDLLFKTNRKVTVKQLKEDYFKKIECFDSVEISGVEDRFNASLGTYHDLLKIIKDKDFLDNEENEDILEDIVLTLTLFEDREMIEERLKTYAHLFDDKVMKQLKRRRYTGWGRLSRKLINGIRDKQSGKTILDFLKSDGFANRNFMQLIHDDSLTFKEDIQKAQVSGQGDSLHEHIANLAGSPAIKKGILQTVKVVDELVKVMGRHKPENIVIEMARENQTTQKGQKNSRERMKRIEEGIKELGSQILKEHPVENTQLQNEKLYLYYLQNGRDMYVDQELDINRLSDYDVDHIVPQSFLKDDSIDNKVLTRSDKARGKSDNVPSEEVVKKMKNYWRQLLNAKLITQRKFDNLTKAERGGLSELDKAGFIKRQLVETRQITKHVAQILDSRMNTKYDENDKLIREVKVITLKSKLVSDFRKDFQFYKVREINNYHHAHDAYLNAVVGTALIKKYPKLESEFVYGDYKVYDVRKMIAKSEQEIGKATAKYFFYSNIMNFFKTEITLANGEIRKRPLIETNGETGEIVWDKGRDFATVRKVLSMPQVNIVKKTEVQTGGFSKESILPKRNSDKLIARKKDWDPKKYGGFDSPTVAYSVLVVAKVEKGKSKKLKSVKELLGITIMERSSFEKNPIDFLEAKGYKEVKKDLIIKLPKYSLFELENGRKRMLASAGELQKGNELALPSKYVNFLYLASHYEKLKGSPEDNEQKQLFVEQHKHYLDEIIEQISEFSKRVILADANLDKVLSAYNKHRDKPIREQAENIIHLFTLTNLGAPAAFKYFDTTIDRKRYTSTKEVLDATLIHQSITGLYETRIDLSQLGGDGGGGSGGGPAPGGTVSLQDEHRLFDIPVTTSLPDVWLQDFPQAWAETGGLGRAKCQAPIIIDLKPTAVPVSIKQYPMSLEAHMGIRQHIIKFLELGVLRPCRSPWNTPLLPVKKPGTQDYRPVQDLREINKRTVDIHPTVPNPYNLLSTLKPDYSWYTVLDLKDAFFCLPLAPQSQELFAFEWKDPERGISGQLTWTRLPQGFKNSPTLFNEALHRDLTDFRTQHPEVTLLQYVDDLLLAAPTKKACTQGTRHLLQELGEKGYRASAKKAQICQTKVTYLGYILSEGKRWLTPGRIETVARIPPPRNPREVREFLGTAGFCRLWIPGFAELAAPLYALTKPSTPFTWQTEHQLAFEALKKALLSAPALGLPDTSKPFTLFLDERQGIAKGVLTQKLGPWKRPVAYLSKKLDPVAAGWPPCLRIMAATAMLVKDSAKLTLGQPLTVITPHTLEAIVRQPPDRWITNARLTHYQALLLDTDRVQFGPPVTLNPATLLPVPENQPSPHDCRQVLAETHGTREDLKDQELPDADHTWYTDGSSYLDSGTRRAGAAVVDGHNTIWAQSLPPGTSAQKAELIALTKALELSKGKKANIYTDSRYAFATAHTHGSIYERRGWLTSEGKEIKNKAEIIALLKALFLPQEVAIIHCPGHQKGQDPVAVGNRQADRVARQAAMAEVLTLATEPDNTSHITAGKRTADGSEFEKRTADGSEFESPKKKAKVE

SEQ ID NO: 6974 - protein, 2092 aa, synthetic construct
MPAAKRVKLDGGDKKYSIGLDIGTNSVGWAVITDEYKVPSKKFKVLGNTDRHSIKKNLIGALLFDSGETAEATRLKRTARRRYTRRKNRICYLQEIFSNEMAKVDDSFFHRLEESFLVEEDKKHERHPIFGNIVDEVAYHEKYPTIYHLRKKLVDSTDKADLRLIYLALAHMIKFRGHFLIEGDLNPDNSDVDKLFIQLVQTYNQLFEENPINASGVDAKAILSARLSKSRRLENLIAQLPGEKKNGLFGNLIALSLGLTPNFKSNFDLAEDAKLQLSKDTYDDDLDNLLAQIGDQYADLFLAAKNLSDAILLSDILRVNTEITKAPLSASMIKRYDEHHQDLTLLKALVRQQLPEKYKEIFFDQSKNGYAGYIDGGASQEEFYKFIKPILEKMDGTEELLVKLNREDLLRKQRTFDNGSIPHQIHLGELHAILRRQEDFYPFLKDNREKIEKILTFRIPYYVGPLARGNSRFAWMTRKSEETITPWNFEEVVDKGASAQSFIERMTNFDKNLPNEKVLPKHSLLYEYFTVYNELTKVKYVTEGMRKPAFLSGEQKKAIVDLLFKTNRKVTVKQLKEDYFKKIECFDSVEISGVEDRFNASLGTYHDLLKIIKDKDFLDNEENEDILEDIVLTLTLFEDREMIEERLKTYAHLFDDKVMKQLKRRRYTGWGRLSRKLINGIRDKQSGKTILDFLKSDGFANRNFMQLIHDDSLTFKEDIQKAQVSGQGDSLHEHIANLAGSPAIKKGILQTVKVVDELVKVMGRHKPENIVIEMARENQTTQKGQKNSRERMKRIEEGIKELGSQILKEHPVENTQLQNEKLYLYYLQNGRDMYVDQELDINRLSDYDVDHIVPQSFLKDDSIDNKVLTRSDKARGKSDNVPSEEVVKKMKNYWRQLLNAKLITQRKFDNLTKAERGGLSELDKAGFIKRQLVETRQITKHVAQILDSRMNTKYDENDKLIREVKVITLKSKLVSDFRKDFQFYKVREINNYHHAHDAYLNAVVGTALIKKYPKLESEFVYGDYKVYDVRKMIAKSEQEIGKATAKYFFYSNIMNFFKTEITLANGEIRKRPLIETNGETGEIVWDKGRDFATVRKVLSMPQVNIVKKTEVQTGGFSKESILPKRNSDKLIARKKDWDPKKYGGFDSPTVAYSVLVVAKVEKGKSKKLKSVKELLGITIMERSSFEKNPIDFLEAKGYKEVKKDLIIKLPKYSLFELENGRKRMLASAGELQKGNELALPSKYVNFLYLASHYEKLKGSPEDNEQKQLFVEQHKHYLDEIIEQISEFSKRVILADANLDKVLSAYNKHRDKPIREQAENIIHLFTLTNLGAPAAFKYFDTTIDRKRYTSTKEVLDATLIHQSITGLYETRIDLSQLGGDGGGGSGGGPAPGGVLNLEEEYRLHEKPVPSSIDPSWLQLFPTVWAERAGMGLANQVPPVVVELRSGASPVAVRQYPMSKEAREGIRPHIQKFLDLGVLVPCRSPWNTPLLPVKKPGTNDYRPVQDLREINKRVQDIHPTVPNPYNLLSSLPPSYTWYSVLDLKDAFFCLRLHPNSQPLFAFEWKDPEKGNTGQLTWTRLPQGFKNSPTLFNEALHRDLAPFRALNPQVVLLQYVDDLLVAAPTYEDCKKGTQKLLQELSKLGYRVSAKKAQLCQREVTYLGYLLKEGKRWLTPARKATVMKIPVPTTPRQVREFLGTAGFCRLWIPGFASLAAPLYPLTKPSIPFIWTEEHQQAFDHIKKALLSAPALALPDLTKPFTLYIDERAGVARGVLTQTLGPWRRPVAYLSKKLDPVASGWPTCLKAVAAVALLLKDADKLTLGQNVTVIASHSLESIVRQPPDRWMTNARMTHYQSLLLNERVSFAPPAVLNPATLLPVESEATPVHRCSEILAEETGTRRDLEDQPLPGVPTWYTDGSSFITEGKRRAGAPIVDGKRTVWASSLPEGTSAQKAELVALTQALRLAEGKNINIYTDSRYAFATAHIHGAIYKQRGWLTSAGKDIKNKEEILALLEAIHLPRRVAIIHCPGHQRGSNPVATGNRRADEAAKQAALSTRVLAGTTKPAGKRTADGSEFEKRTADGSEFESPKKKAKVE

SEQ ID NO: 6975 - protein, 2092 aa, synthetic construct
MPAAKRVKLDGGDKKYSIGLDIGTNSVGWAVITDEYKVPSKKFKVLGNTDRHSIKKNLIGALLFDSGETAEATRLKRTARRRYTRRKNRICYLQEIFSNEMAKVDDSFFHRLEESFLVEEDKKHERHPIFGNIVDEVAYHEKYPTIYHLRKKLVDSTDKADLRLIYLALAHMIKFRGHFLIEGDLNPDNSDVDKLFIQLVQTYNQLFEENPINASGVDAKAILSARLSKSRRLENLIAQLPGEKKNGLFGNLIALSLGLTPNFKSNFDLAEDAKLQLSKDTYDDDLDNLLAQIGDQYADLFLAAKNLSDAILLSDILRVNTEITKAPLSASMIKRYDEHHQDLTLLKALVRQQLPEKYKEIFFDQSKNGYAGYIDGGASQEEFYKFIKPILEKMDGTEELLVKLNREDLLRKQRTFDNGSIPHQIHLGELHAILRRQEDFYPFLKDNREKIEKILTFRIPYYVGPLARGNSRFAWMTRKSEETITPWNFEEVVDKGASAQSFIERMTNFDKNLPNEKVLPKHSLLYEYFTVYNELTKVKYVTEGMRKPAFLSGEQKKAIVDLLFKTNRKVTVKQLKEDYFKKIECFDSVEISGVEDRFNASLGTYHDLLKIIKDKDFLDNEENEDILEDIVLTLTLFEDREMIEERLKTYAHLFDDKVMKQLKRRRYTGWGRLSRKLINGIRDKQSGKTILDFLKSDGFANRNFMQLIHDDSLTFKEDIQKAQVSGQGDSLHEHIANLAGSPAIKKGILQTVKVVDELVKVMGRHKPENIVIEMARENQTTQKGQKNSRERMKRIEEGIKELGSQILKEHPVENTQLQNEKLYLYYLQNGRDMYVDQELDINRLSDYDVDHIVPQSFLKDDSIDNKVLTRSDKARGKSDNVPSEEVVKKMKNYWRQLLNAKLITQRKFDNLTKAERGGLSELDKAGFIKRQLVETRQITKHVAQILDSRMNTKYDENDKLIREVKVITLKSKLVSDFRKDFQFYKVREINNYHHAHDAYLNAVVGTALIKKYPKLESEFVYGDYKVYDVRKMIAKSEQEIGKATAKYFFYSNIMNFFKTEITLANGEIRKRPLIETNGETGEIVWDKGRDFATVRKVLSMPQVNIVKKTEVQTGGFSKESILPKRNSDKLIARKKDWDPKKYGGFDSPTVAYSVLVVAKVEKGKSKKLKSVKELLGITIMERSSFEKNPIDFLEAKGYKEVKKDLIIKLPKYSLFELENGRKRMLASAGELQKGNELALPSKYVNFLYLASHYEKLKGSPEDNEQKQLFVEQHKHYLDEIIEQISEFSKRVILADANLDKVLSAYNKHRDKPIREQAENIIHLFTLTNLGAPAAFKYFDTTIDRKRYTSTKEVLDATLIHQSITGLYETRIDLSQLGGDGGGGSGGGPAPGGVLNLEEEYRLHEKPVPSSIDPSWLQLFPTVWAERAGMGLANQVPPVVVELRSGASPVAVRQYPMSKEAREGIRPHIQKFLDLGVLVPCRSPWNTPLLPVKKPGTNDYRPVQDLREINKRVQDIHPTVPNPYNLLSSLPPSYTWYSVLDLKDAFFCLRLHPNSQPLFAFEWKDPEKGNTGQLTWTRLPQGFKNSPTLFNEALHRDLAPFRALNPQVVLLQYVDDLLVAAPTYEDCKKGTQKLLQELSKLGYRVSAKKAQLCQREVTYLGYLLKEGKRWLTPARKATVMKIPVPTTPRQVREFLGKAGFCRLFIPGFASLAAPLYPLTKPSIPFIWTEEHQQAFDHIKKALLSAPALALPDLTKPFTLYIDERAGVARGVLTQTLGPWRRPVAYLSKKLDPVASGWPTCLKAVAAVALLLKDADKLTLGQNVTVIASHSLESIVRQPPDRWMTNARMTHYQSLLLNERVSFAPPAVLNPATLLPVESEATPVHRCSEILAEETGTRRDLEDQPLPGVPTWYTDGSSFITEGKRRAGAPIVDGKRTVWASSLPEGTSAQKAELVALTQALRLAEGKNINIYTDSRYAFATAHIHGAIYKQRGWLTSAGKDIKNKEEILALLEAIHLPRRVAIIHCPGHQRGSNPVATGNRRADEAAKQAALSTRVLAGTTKPAGKRTADGSEFEKRTADGSEFESPKKKAKVE

SEQ ID NO: 6976 - protein, 2125 aa, synthetic construct
MPAAKRVKLDGGDKKYSIGLDIGTNSVGWAVITDEYKVPSKKFKVLGNTDRHSIKKNLIGALLFDSGETAEATRLKRTARRRYTRRKNRICYLQEIFSNEMAKVDDSFFHRLEESFLVEEDKKHERHPIFGNIVDEVAYHEKYPTIYHLRKKLVDSTDKADLRLIYLALAHMIKFRGHFLIEGDLNPDNSDVDKLFIQLVQTYNQLFEENPINASGVDAKAILSARLSKSRRLENLIAQLPGEKKNGLFGNLIALSLGLTPNFKSNFDLAEDAKLQLSKDTYDDDLDNLLAQIGDQYADLFLAAKNLSDAILLSDILRVNTEITKAPLSASMIKRYDEHHQDLTLLKALVRQQLPEKYKEIFFDQSKNGYAGYIDGGASQEEFYKFIKPILEKMDGTEELLVKLNREDLLRKQRTFDNGSIPHQIHLGELHAILRRQEDFYPFLKDNREKIEKILTFRIPYYVGPLARGNSRFAWMTRKSEETITPWNFEEVVDKGASAQSFIERMTNFDKNLPNEKVLPKHSLLYEYFTVYNELTKVKYVTEGMRKPAFLSGEQKKAIVDLLFKTNRKVTVKQLKEDYFKKIECFDSVEISGVEDRFNASLGTYHDLLKIIKDKDFLDNEENEDILEDIVLTLTLFEDREMIEERLKTYAHLFDDKVMKQLKRRRYTGWGRLSRKLINGIRDKQSGKTILDFLKSDGFANRNFMQLIHDDSLTFKEDIQKAQVSGQGDSLHEHIANLAGSPAIKKGILQTVKVVDELVKVMGRHKPENIVIEMARENQTTQKGQKNSRERMKRIEEGIKELGSQILKEHPVENTQLQNEKLYLYYLQNGRDMYVDQELDINRLSDYDVDHIVPQSFLKDDSIDNKVLTRSDKARGKSDNVPSEEVVKKMKNYWRQLLNAKLITQRKFDNLTKAERGGLSELDKAGFIKRQLVETRQITKHVAQILDSRMNTKYDENDKLIREVKVITLKSKLVSDFRKDFQFYKVREINNYHHAHDAYLNAVVGTALIKKYPKLESEFVYGDYKVYDVRKMIAKSEQEIGKATAKYFFYSNIMNFFKTEITLANGEIRKRPLIETNGETGEIVWDKGRDFATVRKVLSMPQVNIVKKTEVQTGGFSKESILPKRNSDKLIARKKDWDPKKYGGFDSPTVAYSVLVVAKVEKGKSKKLKSVKELLGITIMERSSFEKNPIDFLEAKGYKEVKKDLIIKLPKYSLFELENGRKRMLASAGELQKGNELALPSKYVNFLYLASHYEKLKGSPEDNEQKQLFVEQHKHYLDEIIEQISEFSKRVILADANLDKVLSAYNKHRDKPIREQAENIIHLFTLTNLGAPAAFKYFDTTIDRKRYTSTKEVLDATLIHQSITGLYETRIDLSQLGGDGGGGSGGGPAPGGLLGRDLLTKLKAQIQFSTEGPQVTWEDRPAMCLVLNLEEEYRLHEKPVPPSIDPSWLQLFPMVWAEKAGMGLANQVPPVVVELKSDASPVAVRQYPMSKEAREGIRPHIQRFLDLGILVPCQSPWNTPLLPVKKPGTNDYRPVQDLREVNKRVQDIHPTVPNPYNLLSSLPPSHTWYSVLDLKDAFFCLKLHPNSQPLFAFEWRDPEKGNTGQLTWTRLPQGFKNSPTLFNEALHRDLASFRALNPQVVMLQYVDDLLVAAPTYRDCKEGTRRLLQELSKLGYRVSAKKAQLCREEVTYLGYLLKGGKRWLTPARKATVMKIPTPTTPRQVREFLGTAGFCRLWIPGFASLAAPLYPLTRPKVPFTWTEAHQEAFGRIKEALLSAPALALPDLTKPFALYVDEKEGVARGVLTQTLGPWRRPVAYLSKKLDPVASGWPTCLKAIAAVALLLKDADKLTLGQNVLVIAPHNLESIVRQPPDRWMTNARMTHYQSLLLNERVSFAPPAILNPATLLPVESDDTPIHICSEILAEETGTRPDLRDQPLPGVPAWYTDGSSFIMDGRRQAGAAIVDNKRTVWASNLPEGTSAQKAELIALTQALRLAEGKSINIYTDSRYAFATAHVHGAIYKQRGWLTSAGKDIKNKEEILALLEAIHLPKRVAIIHCPGHQRGTDPVATGNRKADEAAKQAAQSTRILTETTKNAGKRTADGSEFEKRTADGSEFESPKKKAKVE

SEQ ID NO: 6977 - protein, 2125 aa, synthetic construct
MPAAKRVKLDGGDKKYSIGLDIGTNSVGWAVITDEYKVPSKKFKVLGNTDRHSIKKNLIGALLFDSGETAEATRLKRTARRRYTRRKNRICYLQEIFSNEMAKVDDSFFHRLEESFLVEEDKKHERHPIFGNIVDEVAYHEKYPTIYHLRKKLVDSTDKADLRLIYLALAHMIKFRGHFLIEGDLNPDNSDVDKLFIQLVQTYNQLFEENPINASGVDAKAILSARLSKSRRLENLIAQLPGEKKNGLFGNLIALSLGLTPNFKSNFDLAEDAKLQLSKDTYDDDLDNLLAQIGDQYADLFLAAKNLSDAILLSDILRVNTEITKAPLSASMIKRYDEHHQDLTLLKALVRQQLPEKYKEIFFDQSKNGYAGYIDGGASQEEFYKFIKPILEKMDGTEELLVKLNREDLLRKQRTFDNGSIPHQIHLGELHAILRRQEDFYPFLKDNREKIEKILTFRIPYYVGPLARGNSRFAWMTRKSEETITPWNFEEVVDKGASAQSFIERMTNFDKNLPNEKVLPKHSLLYEYFTVYNELTKVKYVTEGMRKPAFLSGEQKKAIVDLLFKTNRKVTVKQLKEDYFKKIECFDSVEISGVEDRFNASLGTYHDLLKIIKDKDFLDNEENEDILEDIVLTLTLFEDREMIEERLKTYAHLFDDKVMKQLKRRRYTGWGRLSRKLINGIRDKQSGKTILDFLKSDGFANRNFMQLIHDDSLTFKEDIQKAQVSGQGDSLHEHIANLAGSPAIKKGILQTVKVVDELVKVMGRHKPENIVIEMARENQTTQKGQKNSRERMKRIEEGIKELGSQILKEHPVENTQLQNEKLYLYYLQNGRDMYVDQELDINRLSDYDVDHIVPQSFLKDDSIDNKVLTRSDKARGKSDNVPSEEVVKKMKNYWRQLLNAKLITQRKFDNLTKAERGGLSELDKAGFIKRQLVETRQITKHVAQILDSRMNTKYDENDKLIREVKVITLKSKLVSDFRKDFQFYKVREINNYHHAHDAYLNAVVGTALIKKYPKLESEFVYGDYKVYDVRKMIAKSEQEIGKATAKYFFYSNIMNFFKTEITLANGEIRKRPLIETNGETGEIVWDKGRDFATVRKVLSMPQVNIVKKTEVQTGGFSKESILPKRNSDKLIARKKDWDPKKYGGFDSPTVAYSVLVVAKVEKGKSKKLKSVKELLGITIMERSSFEKNPIDFLEAKGYKEVKKDLIIKLPKYSLFELENGRKRMLASAGELQKGNELALPSKYVNFLYLASHYEKLKGSPEDNEQKQLFVEQHKHYLDEIIEQISEFSKRVILADANLDKVLSAYNKHRDKPIREQAENIIHLFTLTNLGAPAAFKYFDTTIDRKRYTSTKEVLDATLIHQSITGLYETRIDLSQLGGDGGGGSGGGPAPGGLLGRDLLTKLKAQIQFSTEGPQVTWEDRPAMCLVLNLEEEYRLHEKPVPPSIDPSWLQLFPMVWAEKAGMGLANQVPPVVVELKSDASPVAVRQYPMSKEAREGIRPHIQRFLDLGILVPCQSPWNTPLLPVKKPGTNDYRPVQDLREVNKRVQDIHPTVPNPYNLLSSLPPSHTWYSVLDLKDAFFCLKLHPNSQPLFAFEWRDPEKGNTGQLTWTRLPQGFKNSPTLFNEALHRDLASFRALNPQVVMLQYVDDLLVAAPTYRDCKEGTRRLLQELSKLGYRVSAKKAQLCREEVTYLGYLLKGGKRWLTPARKATVMKIPTPTTPRQVREFLGKAGFCRLFIPGFASLAAPLYPLTRPKVPFTWTEAHQEAFGRIKEALLSAPALALPDLTKPFALYVDEKEGVARGVLTQTLGPWRRPVAYLSKKLDPVASGWPTCLKAIAAVALLLKDADKLTLGQNVLVIAPHNLESIVRQPPDRWMTNARMTHYQSLLLNERVSFAPPAILNPATLLPVESDDTPIHICSEILAEETGTRPDLRDQPLPGVPAWYTDGSSFIMDGRRQAGAAIVDNKRTVWASNLPEGTSAQKAELIALTQALRLAEGKSINIYTDSRYAFATAHVHGAIYKQRGWLTSAGKDIKNKEEILALLEAIHLPKRVAIIHCPGHQRGTDPVATGNRKADEAAKQAAQSTRILTETTKNAGKRTADGSEFEKRTADGSEFESPKKKAKVE

SEQ ID NO: 6978 - protein, 2094 aa, synthetic construct
MPAAKRVKLDGGDKKYSIGLDIGTNSVGWAVITDEYKVPSKKFKVLGNTDRHSIKKNLIGALLFDSGETAEATRLKRTARRRYTRRKNRICYLQEIFSNEMAKVDDSFFHRLEESFLVEEDKKHERHPIFGNIVDEVAYHEKYPTIYHLRKKLVDSTDKADLRLIYLALAHMIKFRGHFLIEGDLNPDNSDVDKLFIQLVQTYNQLFEENPINASGVDAKAILSARLSKSRRLENLIAQLPGEKKNGLFGNLIALSLGLTPNFKSNFDLAEDAKLQLSKDTYDDDLDNLLAQIGDQYADLFLAAKNLSDAILLSDILRVNTEITKAPLSASMIKRYDEHHQDLTLLKALVRQQLPEKYKEIFFDQSKNGYAGYIDGGASQEEFYKFIKPILEKMDGTEELLVKLNREDLLRKQRTFDNGSIPHQIHLGELHAILRRQEDFYPFLKDNREKIEKILTFRIPYYVGPLARGNSRFAWMTRKSEETITPWNFEEVVDKGASAQSFIERMTNFDKNLPNEKVLPKHSLLYEYFTVYNELTKVKYVTEGMRKPAFLSGEQKKAIVDLLFKTNRKVTVKQLKEDYFKKIECFDSVEISGVEDRFNASLGTYHDLLKIIKDKDFLDNEENEDILEDIVLTLTLFEDREMIEERLKTYAHLFDDKVMKQLKRRRYTGWGRLSRKLINGIRDKQSGKTILDFLKSDGFANRNFMQLIHDDSLTFKEDIQKAQVSGQGDSLHEHIANLAGSPAIKKGILQTVKVVDELVKVMGRHKPENIVIEMARENQTTQKGQKNSRERMKRIEEGIKELGSQILKEHPVENTQLQNEKLYLYYLQNGRDMYVDQELDINRLSDYDVDHIVPQSFLKDDSIDNKVLTRSDKARGKSDNVPSEEVVKKMKNYWRQLLNAKLITQRKFDNLTKAERGGLSELDKAGFIKRQLVETRQITKHVAQILDSRMNTKYDENDKLIREVKVITLKSKLVSDFRKDFQFYKVREINNYHHAHDAYLNAVVGTALIKKYPKLESEFVYGDYKVYDVRKMIAKSEQEIGKATAKYFFYSNIMNFFKTEITLANGEIRKRPLIETNGETGEIVWDKGRDFATVRKVLSMPQVNIVKKTEVQTGGFSKESILPKRNSDKLIARKKDWDPKKYGGFDSPTVAYSVLVVAKVEKGKSKKLKSVKELLGITIMERSSFEKNPIDFLEAKGYKEVKKDLIIKLPKYSLFELENGRKRMLASAGELQKGNELALPSKYVNFLYLASHYEKLKGSPEDNEQKQLFVEQHKHYLDEIIEQISEFSKRVILADANLDKVLSAYNKHRDKPIREQAENIIHLFTLTNLGAPAAFKYFDTTIDRKRYTSTKEVLDATLIHQSITGLYETRIDLSQLGGDGGGGSGGGPAPGGTLNLEDEYRLYETSAEPEVSPGSTWLSDFPQAWAETGGMGLAVRQAPLIIPLKATSTPVSIKQYPMSQEAKLGIKPHIQRLLDQGILVPCQSPWNTPLLPVKKPGTNDYRPVQDLREVNKRVEDIHPTVPNPYNLLSGLPPSHRWYTVLDLKDAFFCLRLHPTSQPLFAFEWRDPGMGISGQLTWTRLPQGFKNSPTLFNEALHRDLADFRIQHPDLILLQYVDDILLAATSELDCQQGTRALLLTLGNLGYRASAKKAQLCQKQVKYLGYLLKEGQRWLTEARKETVMGQPTPKTPRQLREFLGTAGFCRLWIPGFAEMAAPLYPLTKPGTLFNWGPDQQKAYQEIKQALLTAPALGLPDLTKPFELFVDEKQGYAKGVLTQKLGPWRRPVAYLSKKLDPVAAGWPPCLRMVAAIAVLRKDAGKLTMGQPLVILAPHAVEALVKQPPDRWLSNARMTHYQAMLLDTDRVQFGPVVALNPATLLPLPEEGAPHDCLEILAETHGTRPDLTDQPIPDADHTWYTDGSSFLQEGQRKAGAAVTTETEVIWARALPAGTSAQRAELIALTQALKMAEGKRLNVYTDSRYAFATAHIHGEIYRRRGWLTSEGREIKNKSEILALLKALFLPKRLSIIHCLGHQKGDSAEARGNRLADQAAREAAIKTPPDTSTLLAGKRTADGSEFEKRTADGSEFESPKKKAKVE

SEQ ID NO: 6979 - protein, 2094 aa, synthetic construct
MPAAKRVKLDGGDKKYSIGLDIGTNSVGWAVITDEYKVPSKKFKVLGNTDRHSIKKNLIGALLFDSGETAEATRLKRTARRRYTRRKNRICYLQEIFSNEMAKVDDSFFHRLEESFLVEEDKKHERHPIFGNIVDEVAYHEKYPTIYHLRKKLVDSTDKADLRLIYLALAHMIKFRGHFLIEGDLNPDNSDVDKLFIQLVQTYNQLFEENPINASGVDAKAILSARLSKSRRLENLIAQLPGEKKNGLFGNLIALSLGLTPNFKSNFDLAEDAKLQLSKDTYDDDLDNLLAQIGDQYADLFLAAKNLSDAILLSDILRVNTEITKAPLSASMIKRYDEHHQDLTLLKALVRQQLPEKYKEIFFDQSKNGYAGYIDGGASQEEFYKFIKPILEKMDGTEELLVKLNREDLLRKQRTFDNGSIPHQIHLGELHAILRRQEDFYPFLKDNREKIEKILTFRIPYYVGPLARGNSRFAWMTRKSEETITPWNFEEVVDKGASAQSFIERMTNFDKNLPNEKVLPKHSLLYEYFTVYNELTKVKYVTEGMRKPAFLSGEQKKAIVDLLFKTNRKVTVKQLKEDYFKKIECFDSVEISGVEDRFNASLGTYHDLLKIIKDKDFLDNEENEDILEDIVLTLTLFEDREMIEERLKTYAHLFDDKVMKQLKRRRYTGWGRLSRKLINGIRDKQSGKTILDFLKSDGFANRNFMQLIHDDSLTFKEDIQKAQVSGQGDSLHEHIANLAGSPAIKKGILQTVKVVDELVKVMGRHKPENIVIEMARENQTTQKGQKNSRERMKRIEEGIKELGSQILKEHPVENTQLQNEKLYLYYLQNGRDMYVDQELDINRLSDYDVDHIVPQSFLKDDSIDNKVLTRSDKARGKSDNVPSEEVVKKMKNYWRQLLNAKLITQRKFDNLTKAERGGLSELDKAGFIKRQLVETRQITKHVAQILDSRMNTKYDENDKLIREVKVITLKSKLVSDFRKDFQFYKVREINNYHHAHDAYLNAVVGTALIKKYPKLESEFVYGDYKVYDVRKMIAKSEQEIGKATAKYFFYSNIMNFFKTEITLANGEIRKRPLIETNGETGEIVWDKGRDFATVRKVLSMPQVNIVKKTEVQTGGFSKESILPKRNSDKLIARKKDWDPKKYGGFDSPTVAYSVLVVAKVEKGKSKKLKSVKELLGITIMERSSFEKNPIDFLEAKGYKEVKKDLIIKLPKYSLFELENGRKRMLASAGELQKGNELALPSKYVNFLYLASHYEKLKGSPEDNEQKQLFVEQHKHYLDEIIEQISEFSKRVILADANLDKVLSAYNKHRDKPIREQAENIIHLFTLTNLGAPAAFKYFDTTIDRKRYTSTKEVLDATLIHQSITGLYETRIDLSQLGGDGGGGSGGGPAPGGTLNLEDEYRLYETSAEPEVSPGSTWLSDFPQAWAETGGMGLAVRQAPLIIPLKATSTPVSIKQYPMSQEAKLGIKPHIQRLLDQGILVPCQSPWNTPLLPVKKPGTNDYRPVQDLREVNKRVEDIHPTVPNPYNLLSGLPPSHRWYTVLDLKDAFFCLRLHPTSQPLFAFEWRDPGMGISGQLTWTRLPQGFKNSPTLFNEALHRDLADFRIQHPDLILLQYVDDILLAATSELDCQQGTRALLLTLGNLGYRASAKKAQLCQKQVKYLGYLLKEGQRWLTEARKETVMGQPTPKTPRQLREFLGKAGFCRLFIPGFAEMAAPLYPLTKPGTLFNWGPDQQKAYQEIKQALLTAPALGLPDLTKPFELFVDEKQGYAKGVLTQKLGPWRRPVAYLSKKLDPVAAGWPPCLRMVAAIAVLRKDAGKLTMGQPLVILAPHAVEALVKQPPDRWLSNARMTHYQAMLLDTDRVQFGPVVALNPATLLPLPEEGAPHDCLEILAETHGTRPDLTDQPIPDADHTWYTDGSSFLQEGQRKAGAAVTTETEVIWARALPAGTSAQRAELIALTQALKMAEGKRLNVYTDSRYAFATAHIHGEIYRRRGWLTSEGREIKNKSEILALLKALFLPKRLSIIHCLGHQKGDSAEARGNRLADQAAREAAIKTPPDTSTLLAGKRTADGSEFEKRTADGSEFESPKKKAKVE

SEQ ID NO: 6980 - protein, 2094 aa, synthetic construct
MPAAKRVKLDGGDKKYSIGLDIGTNSVGWAVITDEYKVPSKKFKVLGNTDRHSIKKNLIGALLFDSGETAEATRLKRTARRRYTRRKNRICYLQEIFSNEMAKVDDSFFHRLEESFLVEEDKKHERHPIFGNIVDEVAYHEKYPTIYHLRKKLVDSTDKADLRLIYLALAHMIKFRGHFLIEGDLNPDNSDVDKLFIQLVQTYNQLFEENPINASGVDAKAILSARLSKSRRLENLIAQLPGEKKNGLFGNLIALSLGLTPNFKSNFDLAEDAKLQLSKDTYDDDLDNLLAQIGDQYADLFLAAKNLSDAILLSDILRVNTEITKAPLSASMIKRYDEHHQDLTLLKALVRQQLPEKYKEIFFDQSKNGYAGYIDGGASQEEFYKFIKPILEKMDGTEELLVKLNREDLLRKQRTFDNGSIPHQIHLGELHAILRRQEDFYPFLKDNREKIEKILTFRIPYYVGPLARGNSRFAWMTRKSEETITPWNFEEVVDKGASAQSFIERMTNFDKNLPNEKVLPKHSLLYEYFTVYNELTKVKYVTEGMRKPAFLSGEQKKAIVDLLFKTNRKVTVKQLKEDYFKKIECFDSVEISGVEDRFNASLGTYHDLLKIIKDKDFLDNEENEDILEDIVLTLTLFEDREMIEERLKTYAHLFDDKVMKQLKRRRYTGWGRLSRKLINGIRDKQSGKTILDFLKSDGFANRNFMQLIHDDSLTFKEDIQKAQVSGQGDSLHEHIANLAGSPAIKKGILQTVKVVDELVKVMGRHKPENIVIEMARENQTTQKGQKNSRERMKRIEEGIKELGSQILKEHPVENTQLQNEKLYLYYLQNGRDMYVDQELDINRLSDYDVDHIVPQSFLKDDSIDNKVLTRSDKARGKSDNVPSEEVVKKMKNYWRQLLNAKLITQRKFDNLTKAERGGLSELDKAGFIKRQLVETRQITKHVAQILDSRMNTKYDENDKLIREVKVITLKSKLVSDFRKDFQFYKVREINNYHHAHDAYLNAVVGTALIKKYPKLESEFVYGDYKVYDVRKMIAKSEQEIGKATAKYFFYSNIMNFFKTEITLANGEIRKRPLIETNGETGEIVWDKGRDFATVRKVLSMPQVNIVKKTEVQTGGFSKESILPKRNSDKLIARKKDWDPKKYGGFDSPTVAYSVLVVAKVEKGKSKKLKSVKELLGITIMERSSFEKNPIDFLEAKGYKEVKKDLIIKLPKYSLFELENGRKRMLASAGELQKGNELALPSKYVNFLYLASHYEKLKGSPEDNEQKQLFVEQHKHYLDEIIEQISEFSKRVILADANLDKVLSAYNKHRDKPIREQAENIIHLFTLTNLGAPAAFKYFDTTIDRKRYTSTKEVLDATLIHQSITGLYETRIDLSQLGGDGGGGSGGGPAPGGTLNIEDEYRLHETSKGPDVPLGSTWLSDFPQAWAETGGMGLAVRQAPLIIPLKATSTPVSIKQYPMSQEARLGIKPHIQRLLDQGILVPCQSPWNTPLLPVKKPGTNDYRPVQDLREVNKRVEDIHPTVPNPYNLLSGLPPSHQWYTVLDLKDAFFCLRLHPTSQSLFAFEWRDPEMGISGQLTWTRLPQGFKNSPTLFNEALHRDLADFRIQHPDLILLQYVDDLLLAATSELDCQQGTRALLQTLGDLGYRASAKKAQICQKQVKYLGYLLKEGQRWLTEARKETVMGQPTPKTPRQLREFLGKAGFCRLFIPGFAEMAAPLYPLTKPGTLFEWGPDQQKAYQEIKQALLTAPALGLPDLTKPFELFVDEKQGYAKGVLTQKLGPWRRPVAYLSKKLDPVAAGWPPCLRMVAAIAVLTKDAGKLTMGQPLVILAPHAVEALVKQPPDRWLSNARMTHYQALLLDTDRVQFGPIVALNPATLLPLPEEGLQHDCLDILAEAHGTRPDLTDQPLPDADHTWYTDGSSFLQEGQRKAGAAVTTETEVVWAKALPAGTSAQRAELIALTQALKMAEGKKLNVYTDSRYAFATAHIHGEIYRRRGWLTSEGKEIKNKDEILALLKALFLPKRLSIIHCPGHQKGNRAEARGNRMADQAAREVATRETPETSTLLAGKRTADGSEFEKRTADGSEFESPKKKAKVE

SEQ ID NO: 6981 - protein, 2114 aa, synthetic construct
MPAAKRVKLDGGDKKYSIGLDIGTNSVGWAVITDEYKVPSKKFKVLGNTDRHSIKKNLIGALLFDSGETAEATRLKRTARRRYTRRKNRICYLQEIFSNEMAKVDDSFFHRLEESFLVEEDKKHERHPIFGNIVDEVAYHEKYPTIYHLRKKLVDSTDKADLRLIYLALAHMIKFRGHFLIEGDLNPDNSDVDKLFIQLVQTYNQLFEENPINASGVDAKAILSARLSKSRRLENLIAQLPGEKKNGLFGNLIALSLGLTPNFKSNFDLAEDAKLQLSKDTYDDDLDNLLAQIGDQYADLFLAAKNLSDAILLSDILRVNTEITKAPLSASMIKRYDEHHQDLTLLKALVRQQLPEKYKEIFFDQSKNGYAGYIDGGASQEEFYKFIKPILEKMDGTEELLVKLNREDLLRKQRTFDNGSIPHQIHLGELHAILRRQEDFYPFLKDNREKIEKILTFRIPYYVGPLARGNSRFAWMTRKSEETITPWNFEEVVDKGASAQSFIERMTNFDKNLPNEKVLPKHSLLYEYFTVYNELTKVKYVTEGMRKPAFLSGEQKKAIVDLLFKTNRKVTVKQLKEDYFKKIECFDSVEISGVEDRFNASLGTYHDLLKIIKDKDFLDNEENEDILEDIVLTLTLFEDREMIEERLKTYAHLFDDKVMKQLKRRRYTGWGRLSRKLINGIRDKQSGKTILDFLKSDGFANRNFMQLIHDDSLTFKEDIQKAQVSGQGDSLHEHIANLAGSPAIKKGILQTVKVVDELVKVMGRHKPENIVIEMARENQTTQKGQKNSRERMKRIEEGIKELGSQILKEHPVENTQLQNEKLYLYYLQNGRDMYVDQELDINRLSDYDVDHIVPQSFLKDDSIDNKVLTRSDKARGKSDNVPSEEVVKKMKNYWRQLLNAKLITQRKFDNLTKAERGGLSELDKAGFIKRQLVETRQITKHVAQILDSRMNTKYDENDKLIREVKVITLKSKLVSDFRKDFQFYKVREINNYHHAHDAYLNAVVGTALIKKYPKLESEFVYGDYKVYDVRKMIAKSEQEIGKATAKYFFYSNIMNFFKTEITLANGEIRKRPLIETNGETGEIVWDKGRDFATVRKVLSMPQVNIVKKTEVQTGGFSKESILPKRNSDKLIARKKDWDPKKYGGFDSPTVAYSVLVVAKVEKGKSKKLKSVKELLGITIMERSSFEKNPIDFLEAKGYKEVKKDLIIKLPKYSLFELENGRKRMLASAGELQKGNELALPSKYVNFLYLASHYEKLKGSPEDNEQKQLFVEQHKHYLDEIIEQISEFSKRVILADANLDKVLSAYNKHRDKPIREQAENIIHLFTLTNLGAPAAFKYFDTTIDRKRYTSTKEVLDATLIHQSITGLYETRIDLSQLGGDGGGGSGGGPAPGGVQEISDSRPMLHIYLNGRRFLGLLDTGADKTCIAGRDWPANWPIHQTESSLQGLGMACGVARSSQPLRWQHEDKSGIIHPFVIPTLPFTLWGRDIMKDIKVRLMTDSPDDSQDLMIGAIESNLFADQISWKSDQPVWLNQWPLKQEKLQALQQLVTEQLQLGHLEESNSPWNTPVFVIKKKSGKWRLLQDLRAVNATMHDMGALQPGLPSPPAVPKGWEIIIIDLQDCFFNIKLHPEDCKRFAFSVPSPNFKRPYQRFQWKVLPQGMKNSPTLCQKFVDKAILTVRDKYQDSYIVHYMDDILLAHPSRSIVDEILTSMIQALNKHGLVVSTEKIQKYDNLKYLGTHIQGDSVSYQKLQIRTDKLRTLNDFQKLLGNINWIRPFLKLTTGELKPLFEILNPDSNPISTRKLTPEACKALQLMNERLSTARVKRLDLSQPWSLCILKTEYTPTACLWQDGVVEWIHLPHISPKVITPYDIFCTQLIIKGRHRSKELFSKDPDYIVVPYTKVQFDLLLQEKEDWPISLLGFLGEVHFHLPKDPLLTFTLQTAIIFPHMTSTTPLEKGIVIFTDGSANGRSVTYIQGREPIIKENTQNTAQQAEIVAVITAFEEVSQPFNLYTDSKYVTGLFPEIETATLSPRTKIYTELKHLQRLIHKRQEKFYIGHIRGHTGLPGPLAQGNAYADSLTRILTAAGKRTADGSEFEKRTADGSEFESPKKKAKVE

SEQ ID NO: 6982 - protein, 2088 aa, synthetic construct
MPAAKRVKLDGGDKKYSIGLDIGTNSVGWAVITDEYKVPSKKFKVLGNTDRHSIKKNLIGALLFDSGETAEATRLKRTARRRYTRRKNRICYLQEIFSNEMAKVDDSFFHRLEESFLVEEDKKHERHPIFGNIVDEVAYHEKYPTIYHLRKKLVDSTDKADLRLIYLALAHMIKFRGHFLIEGDLNPDNSDVDKLFIQLVQTYNQLFEENPINASGVDAKAILSARLSKSRRLENLIAQLPGEKKNGLFGNLIALSLGLTPNFKSNFDLAEDAKLQLSKDTYDDDLDNLLAQIGDQYADLFLAAKNLSDAILLSDILRVNTEITKAPLSASMIKRYDEHHQDLTLLKALVRQQLPEKYKEIFFDQSKNGYAGYIDGGASQEEFYKFIKPILEKMDGTEELLVKLNREDLLRKQRTFDNGSIPHQIHLGELHAILRRQEDFYPFLKDNREKIEKILTFRIPYYVGPLARGNSRFAWMTRKSEETITPWNFEEVVDKGASAQSFIERMTNFDKNLPNEKVLPKHSLLYEYFTVYNELTKVKYVTEGMRKPAFLSGEQKKAIVDLLFKTNRKVTVKQLKEDYFKKIECFDSVEISGVEDRFNASLGTYHDLLKIIKDKDFLDNEENEDILEDIVLTLTLFEDREMIEERLKTYAHLFDDKVMKQLKRRRYTGWGRLSRKLINGIRDKQSGKTILDFLKSDGFANRNFMQLIHDDSLTFKEDIQKAQVSGQGDSLHEHIANLAGSPAIKKGILQTVKVVDELVKVMGRHKPENIVIEMARENQTTQKGQKNSRERMKRIEEGIKELGSQILKEHPVENTQLQNEKLYLYYLQNGRDMYVDQELDINRLSDYDVDHIVPQSFLKDDSIDNKVLTRSDKARGKSDNVPSEEVVKKMKNYWRQLLNAKLITQRKFDNLTKAERGGLSELDKAGFIKRQLVETRQITKHVAQILDSRMNTKYDENDKLIREVKVITLKSKLVSDFRKDFQFYKVREINNYHHAHDAYLNAVVGTALIKKYPKLESEFVYGDYKVYDVRKMIAKSEQEIGKATAKYFFYSNIMNFFKTEITLANGEIRKRPLIETNGETGEIVWDKGRDFATVRKVLSMPQVNIVKKTEVQTGGFSKESILPKRNSDKLIARKKDWDPKKYGGFDSPTVAYSVLVVAKVEKGKSKKLKSVKELLGITIMERSSFEKNPIDFLEAKGYKEVKKDLIIKLPKYSLFELENGRKRMLASAGELQKGNELALPSKYVNFLYLASHYEKLKGSPEDNEQKQLFVEQHKHYLDEIIEQISEFSKRVILADANLDKVLSAYNKHRDKPIREQAENIIHLFTLTNLGAPAAFKYFDTTIDRKRYTSTKEVLDATLIHQSITGLYETRIDLSQLGGDGGGGSGGGPAPGGTLQLDDEYRLYSPLVKPDQNIQFWLEQFPQAWAETAGMGLAKQVPPQVIQLKASATPVSVRQYPLSKEAQEGIRPHVQRLIQQGILVPVQSPWNTPLLPVRKPGTNDYRPVQDLREVNKRVQDIHPTVPNPYNLLCALPPQRSWYTVLDLKDAFFCLRLHPTSQPLFAFEWRDPGTGRTGQLTWTRLPQGFKNSPTIFDEALHRDLANFRIQHPQVTLLQYVDDLLLAGATKQDCLEGTKALLLELSDLGYRASAKKAQICRREVTYLGYSLRDGQRWLTEARKKTVVQIPAPTTAKQVREFLGTAGFCRLWIPGFATLAAPLYPLTKEKGEFSWAPEHQKAFDAIKKALLSAPALALPDVTKPFTLYVDERKGVARGVLTQTLGPWRRPVAYLSKKLDPVASGWPVCLKAIAAVAILVKDADKLTLGQNITVIAPHALENIVRQPPDRWMTNARMTHYQSLLLTERVTFAPPAALNPATLLPEETDEPVTHDCHQLLIEETGVRKDLTDIPLTGEVLTWFTDGSSYVVEGKRMAGAAVVDGTRTIWASSLPEGTSAQKAELMALTQALRLAEGKSINIYTDSRYAFATAHVHGAIYKQRGLLTSAGREIKNKEEILSLLEALHLPKRLAIIHCPGHQKAKDPISRGNQMADRVAKQAAQGVNLLAGKRTADGSEFEKRTADGSEFESPKKKAKVE

SEQ ID NO: 6983 - protein, 2085 aa, synthetic construct
MPAAKRVKLDGGDKKYSIGLDIGTNSVGWAVITDEYKVPSKKFKVLGNTDRHSIKKNLIGALLFDSGETAEATRLKRTARRRYTRRKNRICYLQEIFSNEMAKVDDSFFHRLEESFLVEEDKKHERHPIFGNIVDEVAYHEKYPTIYHLRKKLVDSTDKADLRLIYLALAHMIKFRGHFLIEGDLNPDNSDVDKLFIQLVQTYNQLFEENPINASGVDAKAILSARLSKSRRLENLIAQLPGEKKNGLFGNLIALSLGLTPNFKSNFDLAEDAKLQLSKDTYDDDLDNLLAQIGDQYADLFLAAKNLSDAILLSDILRVNTEITKAPLSASMIKRYDEHHQDLTLLKALVRQQLPEKYKEIFFDQSKNGYAGYIDGGASQEEFYKFIKPILEKMDGTEELLVKLNREDLLRKQRTFDNGSIPHQIHLGELHAILRRQEDFYPFLKDNREKIEKILTFRIPYYVGPLARGNSRFAWMTRKSEETITPWNFEEVVDKGASAQSFIERMTNFDKNLPNEKVLPKHSLLYEYFTVYNELTKVKYVTEGMRKPAFLSGEQKKAIVDLLFKTNRKVTVKQLKEDYFKKIECFDSVEISGVEDRFNASLGTYHDLLKIIKDKDFLDNEENEDILEDIVLTLTLFEDREMIEERLKTYAHLFDDKVMKQLKRRRYTGWGRLSRKLINGIRDKQSGKTILDFLKSDGFANRNFMQLIHDDSLTFKEDIQKAQVSGQGDSLHEHIANLAGSPAIKKGILQTVKVVDELVKVMGRHKPENIVIEMARENQTTQKGQKNSRERMKRIEEGIKELGSQILKEHPVENTQLQNEKLYLYYLQNGRDMYVDQELDINRLSDYDVDHIVPQSFLKDDSIDNKVLTRSDKARGKSDNVPSEEVVKKMKNYWRQLLNAKLITQRKFDNLTKAERGGLSELDKAGFIKRQLVETRQITKHVAQILDSRMNTKYDENDKLIREVKVITLKSKLVSDFRKDFQFYKVREINNYHHAHDAYLNAVVGTALIKKYPKLESEFVYGDYKVYDVRKMIAKSEQEIGKATAKYFFYSNIMNFFKTEITLANGEIRKRPLIETNGETGEIVWDKGRDFATVRKVLSMPQVNIVKKTEVQTGGFSKESILPKRNSDKLIARKKDWDPKKYGGFDSPTVAYSVLVVAKVEKGKSKKLKSVKELLGITIMERSSFEKNPIDFLEAKGYKEVKKDLIIKLPKYSLFELENGRKRMLASAGELQKGNELALPSKYVNFLYLASHYEKLKGSPEDNEQKQLFVEQHKHYLDEIIEQISEFSKRVILADANLDKVLSAYNKHRDKPIREQAENIIHLFTLTNLGAPAAFKYFDTTIDRKRYTSTKEVLDATLIHQSITGLYETRIDLSQLGGDGGGGSGGGPAPGGVPWLMKKPLQLTVLVPLHEYQERLLQQTALPKEQKELLQKLFLKYDALWQHWENQVGHRRIKPHNIATGTLAPRPQKQYPINPKAKPSIQIVIDDLLKQGVLIQQNSTMNTPVYPVPKPDGKWRMVLDYREVNKTIPLIAAQNQHSAGILSSIYRGKYKTTLDLTNGFWAHPITPESYWLTAFTWQGKQYCWTRLPQGFLNSPALFTADVVDLLKEIPNVQAYVDDIYISHDDPQEHLEQLEKIFSILLNAGYVVSLKKSEIAQREVEFLGFNITKEGRGLTDTFKQKLLNITPPKDLKQLQSILGLLNFARNFIPNYSELVKPLYTIVANANGKFISWTEDNSNQLQHIISVLNQADNLEERNPETRLIIKVNSSPSAGYIRYYNEGSKRPIMYVNYIFSKAEAKFTQTEKLLTTMHKGLIKAMDLAMGQEILVYSPIVSMTKIQRTPLPERKALPVRWITWMTYLEDPRIQFHYDKSLPELQQIPNVTEDVIAKTKHPSEFAMVFYTDGSAIKHPDVNKSHSAGMGIAQVQFIPEYKIVHQWSIPLGDHTAQLAEIAAVEFACKKALKISGPVLIVTDSFYVAESANKELPYWKSNGFLNNKKKPLRHVSKWKSIAECLQLKPDIIIMHEKGHQQPMTTLHTEGNNLADKLATQGSYVVHAGKRTADGSEFEKRTADGSEFESPKKKAKVE

SEQ ID NO: 6984 - protein, 2085 aa, synthetic construct
MPAAKRVKLDGGDKKYSIGLDIGTNSVGWAVITDEYKVPSKKFKVLGNTDRHSIKKNLIGALLFDSGETAEATRLKRTARRRYTRRKNRICYLQEIFSNEMAKVDDSFFHRLEESFLVEEDKKHERHPIFGNIVDEVAYHEKYPTIYHLRKKLVDSTDKADLRLIYLALAHMIKFRGHFLIEGDLNPDNSDVDKLFIQLVQTYNQLFEENPINASGVDAKAILSARLSKSRRLENLIAQLPGEKKNGLFGNLIALSLGLTPNFKSNFDLAEDAKLQLSKDTYDDDLDNLLAQIGDQYADLFLAAKNLSDAILLSDILRVNTEITKAPLSASMIKRYDEHHQDLTLLKALVRQQLPEKYKEIFFDQSKNGYAGYIDGGASQEEFYKFIKPILEKMDGTEELLVKLNREDLLRKQRTFDNGSIPHQIHLGELHAILRRQEDFYPFLKDNREKIEKILTFRIPYYVGPLARGNSRFAWMTRKSEETITPWNFEEVVDKGASAQSFIERMTNFDKNLPNEKVLPKHSLLYEYFTVYNELTKVKYVTEGMRKPAFLSGEQKKAIVDLLFKTNRKVTVKQLKEDYFKKIECFDSVEISGVEDRFNASLGTYHDLLKIIKDKDFLDNEENEDILEDIVLTLTLFEDREMIEERLKTYAHLFDDKVMKQLKRRRYTGWGRLSRKLINGIRDKQSGKTILDFLKSDGFANRNFMQLIHDDSLTFKEDIQKAQVSGQGDSLHEHIANLAGSPAIKKGILQTVKVVDELVKVMGRHKPENIVIEMARENQTTQKGQKNSRERMKRIEEGIKELGSQILKEHPVENTQLQNEKLYLYYLQNGRDMYVDQELDINRLSDYDVDHIVPQSFLKDDSIDNKVLTRSDKARGKSDNVPSEEVVKKMKNYWRQLLNAKLITQRKFDNLTKAERGGLSELDKAGFIKRQLVETRQITKHVAQILDSRMNTKYDENDKLIREVKVITLKSKLVSDFRKDFQFYKVREINNYHHAHDAYLNAVVGTALIKKYPKLESEFVYGDYKVYDVRKMIAKSEQEIGKATAKYFFYSNIMNFFKTEITLANGEIRKRPLIETNGETGEIVWDKGRDFATVRKVLSMPQVNIVKKTEVQTGGFSKESILPKRNSDKLIARKKDWDPKKYGGFDSPTVAYSVLVVAKVEKGKSKKLKSVKELLGITIMERSSFEKNPIDFLEAKGYKEVKKDLIIKLPKYSLFELENGRKRMLASAGELQKGNELALPSKYVNFLYLASHYEKLKGSPEDNEQKQLFVEQHKHYLDEIIEQISEFSKRVILADANLDKVLSAYNKHRDKPIREQAENIIHLFTLTNLGAPAAFKYFDTTIDRKRYTSTKEVLDATLIHQSITGLYETRIDLSQLGGDGGGGSGGGPAPGGIPWLMKKPLQLTTLVPLQEYEERLLKQTMLTGSYKEKLQSLFLKYDALWQHWENQVGHRRIKPHHIATGTVNPRPQKQYPINPKAKASIQTVINDLLKQGVLIQQNSIMNTPVYPVPKPDGKWRMVLDYREVNKTIPLIAAQNQHSAGILSSIFRGKYKTTLDLSNGFWAHSITPESYWLTAFTWLGQQYCWTRLPQGFLNSPALFNADVVDLLKEVPNVQVYVDDIYISHDDPREHLEQLEKVFSLLLNAGYVVSLKKSEIAQHEVEFLGFNITKEGRGLTETFKQKLLNITPPRDLKQLQSILGLLNFARNFIPNFSELVKPLYNIIATAPGKYITWTTDNSQQLQNIISMLNSAENLEERNPEVRLIMKVNTSPSAGYIRFYNEFAKRPIMYLNYVYTKAEVKFTNTEKLLTTIHKGLIKALDLGMGQEILVYSPIVSMTKIQKTPLPERKALPIRWITWMSYLEDPRIQFHYDKTLPELQQVPTVTDDIIAKIKHPSEFSMVFYTDGSAIKHPNVNKSHNAGMGIAQVQFKPEFTVINTWSIPLGDHTAQLAEVAAVEFACKKALKIDGPVLIVTDSFYVAESVNKELPYWQSNGFFNNKKKPLKHVSKWKSIADCIQLKPDIIIIHEKGHQPTASTFHTEGNNLADKLATQGSYVVNAGKRTADGSEFEKRTADGSEFESPKKKAKVE

SEQ ID NO: 6985 - protein, 2100 aa, synthetic construct
MPAAKRVKLDGGDKKYSIGLDIGTNSVGWAVITDEYKVPSKKFKVLGNTDRHSIKKNLIGALLFDSGETAEATRLKRTARRRYTRRKNRICYLQEIFSNEMAKVDDSFFHRLEESFLVEEDKKHERHPIFGNIVDEVAYHEKYPTIYHLRKKLVDSTDKADLRLIYLALAHMIKFRGHFLIEGDLNPDNSDVDKLFIQLVQTYNQLFEENPINASGVDAKAILSARLSKSRRLENLIAQLPGEKKNGLFGNLIALSLGLTPNFKSNFDLAEDAKLQLSKDTYDDDLDNLLAQIGDQYADLFLAAKNLSDAILLSDILRVNTEITKAPLSASMIKRYDEHHQDLTLLKALVRQQLPEKYKEIFFDQSKNGYAGYIDGGASQEEFYKFIKPILEKMDGTEELLVKLNREDLLRKQRTFDNGSIPHQIHLGELHAILRRQEDFYPFLKDNREKIEKILTFRIPYYVGPLARGNSRFAWMTRKSEETITPWNFEEVVDKGASAQSFIERMTNFDKNLPNEKVLPKHSLLYEYFTVYNELTKVKYVTEGMRKPAFLSGEQKKAIVDLLFKTNRKVTVKQLKEDYFKKIECFDSVEISGVEDRFNASLGTYHDLLKIIKDKDFLDNEENEDILEDIVLTLTLFEDREMIEERLKTYAHLFDDKVMKQLKRRRYTGWGRLSRKLINGIRDKQSGKTILDFLKSDGFANRNFMQLIHDDSLTFKEDIQKAQVSGQGDSLHEHIANLAGSPAIKKGILQTVKVVDELVKVMGRHKPENIVIEMARENQTTQKGQKNSRERMKRIEEGIKELGSQILKEHPVENTQLQNEKLYLYYLQNGRDMYVDQELDINRLSDYDVDHIVPQSFLKDDSIDNKVLTRSDKARGKSDNVPSEEVVKKMKNYWRQLLNAKLITQRKFDNLTKAERGGLSELDKAGFIKRQLVETRQITKHVAQILDSRMNTKYDENDKLIREVKVITLKSKLVSDFRKDFQFYKVREINNYHHAHDAYLNAVVGTALIKKYPKLESEFVYGDYKVYDVRKMIAKSEQEIGKATAKYFFYSNIMNFFKTEITLANGEIRKRPLIETNGETGEIVWDKGRDFATVRKVLSMPQVNIVKKTEVQTGGFSKESILPKRNSDKLIARKKDWDPKKYGGFDSPTVAYSVLVVAKVEKGKSKKLKSVKELLGITIMERSSFEKNPIDFLEAKGYKEVKKDLIIKLPKYSLFELENGRKRMLASAGELQKGNELALPSKYVNFLYLASHYEKLKGSPEDNEQKQLFVEQHKHYLDEIIEQISEFSKRVILADANLDKVLSAYNKHRDKPIREQAENIIHLFTLTNLGAPAAFKYFDTTIDRKRYTSTKEVLDATLIHQSITGLYETRIDLSQLGGDGGGGSPAPGGGGGTVSLQDEHRLFDIPVTTSLPDVWLQDFPQAWAETGGLGRAKCQAPIIIDLKPTAVPVSIKQYPMSLEAHMGIRQHIIKFLELGVLRPCRSPWNTPLLPVKKPGTQDYRPVQDLREINKRTVDIHPTVPNPYNLLSTLKPDYSWYTVLDLKDAFFCLPLAPQSQELFAFEWKDPERGISGQLTWTRLPQGFKNSPTLFNEALHRDLTDFRTQHPEVTLLQYVDDLLLAAPTKKACTQGTRHLLQELGEKGYRASAKKAQICQTKVTYLGYILSEGKRWLTPGRIETVARIPPPRNPREVREFLGTAGFCRLWIPGFAELAAPLYALTKPSTPFTWQTEHQLAFEALKKALLSAPALGLPDTSKPFTLFLDERQGIAKGVLTQKLGPWKRPVAYLSKKLDPVAAGWPPCLRIMAATAMLVKDSAKLTLGQPLTVITPHTLEAIVRQPPDRWITNARLTHYQALLLDTDRVQFGPPVTLNPATLLPVPENQPSPHDCRQVLAETHGTREDLKDQELPDADHTWYTDGSSYLDSGTRRAGAAVVDGHNTIWAQSLPPGTSAQKAELIALTKALELSKGKKANIYTDSRYAFATAHTHGSIYERRGWLTSEGKEIKNKAEIIALLKALFLPQEVAIIHCPGHQKGQDPVAVGNRQADRVARQAAMAEVLTLATEPDNTSHITAGKRTADGSEFEKRTADGSEFESPKKKAKVE

SEQ ID NO: 6986 - protein, 2092 aa, synthetic construct
MPAAKRVKLDGGDKKYSIGLDIGTNSVGWAVITDEYKVPSKKFKVLGNTDRHSIKKNLIGALLFDSGETAEATRLKRTARRRYTRRKNRICYLQEIFSNEMAKVDDSFFHRLEESFLVEEDKKHERHPIFGNIVDEVAYHEKYPTIYHLRKKLVDSTDKADLRLIYLALAHMIKFRGHFLIEGDLNPDNSDVDKLFIQLVQTYNQLFEENPINASGVDAKAILSARLSKSRRLENLIAQLPGEKKNGLFGNLIALSLGLTPNFKSNFDLAEDAKLQLSKDTYDDDLDNLLAQIGDQYADLFLAAKNLSDAILLSDILRVNTEITKAPLSASMIKRYDEHHQDLTLLKALVRQQLPEKYKEIFFDQSKNGYAGYIDGGASQEEFYKFIKPILEKMDGTEELLVKLNREDLLRKQRTFDNGSIPHQIHLGELHAILRRQEDFYPFLKDNREKIEKILTFRIPYYVGPLARGNSRFAWMTRKSEETITPWNFEEVVDKGASAQSFIERMTNFDKNLPNEKVLPKHSLLYEYFTVYNELTKVKYVTEGMRKPAFLSGEQKKAIVDLLFKTNRKVTVKQLKEDYFKKIECFDSVEISGVEDRFNASLGTYHDLLKIIKDKDFLDNEENEDILEDIVLTLTLFEDREMIEERLKTYAHLFDDKVMKQLKRRRYTGWGRLSRKLINGIRDKQSGKTILDFLKSDGFANRNFMQLIHDDSLTFKEDIQKAQVSGQGDSLHEHIANLAGSPAIKKGILQTVKVVDELVKVMGRHKPENIVIEMARENQTTQKGQKNSRERMKRIEEGIKELGSQILKEHPVENTQLQNEKLYLYYLQNGRDMYVDQELDINRLSDYDVDHIVPQSFLKDDSIDNKVLTRSDKARGKSDNVPSEEVVKKMKNYWRQLLNAKLITQRKFDNLTKAERGGLSELDKAGFIKRQLVETRQITKHVAQILDSRMNTKYDENDKLIREVKVITLKSKLVSDFRKDFQFYKVREINNYHHAHDAYLNAVVGTALIKKYPKLESEFVYGDYKVYDVRKMIAKSEQEIGKATAKYFFYSNIMNFFKTEITLANGEIRKRPLIETNGETGEIVWDKGRDFATVRKVLSMPQVNIVKKTEVQTGGFSKESILPKRNSDKLIARKKDWDPKKYGGFDSPTVAYSVLVVAKVEKGKSKKLKSVKELLGITIMERSSFEKNPIDFLEAKGYKEVKKDLIIKLPKYSLFELENGRKRMLASAGELQKGNELALPSKYVNFLYLASHYEKLKGSPEDNEQKQLFVEQHKHYLDEIIEQISEFSKRVILADANLDKVLSAYNKHRDKPIREQAENIIHLFTLTNLGAPAAFKYFDTTIDRKRYTSTKEVLDATLIHQSITGLYETRIDLSQLGGDGGGGSPAPGGGGGVLNLEEEYRLHEKPVPSSIDPSWLQLFPTVWAERAGMGLANQVPPVVVELRSGASPVAVRQYPMSKEAREGIRPHIQKFLDLGVLVPCRSPWNTPLLPVKKPGTNDYRPVQDLREINKRVQDIHPTVPNPYNLLSSLPPSYTWYSVLDLKDAFFCLRLHPNSQPLFAFEWKDPEKGNTGQLTWTRLPQGFKNSPTLFDEALHRDLAPFRALNPQVVLLQYVDDLLVAAPTYEDCKKGTQKLLQELSKLGYRVSAKKAQLCQREVTYLGYLLKEGKRWLTPARKATVMKIPVPTTPRQVREFLGTAGFCRLWIPGFASLAAPLYPLTKESIPFIWTEEHQQAFDHIKKALLSAPALALPDLTKPFTLYIDERAGVARGVLTQTLGPWRRPVAYLSKKLDPVASGWPTCLKAVAAVALLLKDADKLTLGQNVTVIASHSLESIVRQPPDRWMTNARMTHYQSLLLNERVSFAPPAVLNPATLLPVESEATPVHRCSEILAEETGTRRDLEDQPLPGVPTWYTDGSSFITEGKRRAGAPIVDGKRTVWASSLPEGTSAQKAELVALTQALRLAEGKNINIYTDSRYAFATAHIHGAIYKQRGLLTSAGKDIKNKEEILALLEAIHLPRRVAIIHCPGHQRGSNPVATGNRRADEAAKQAALSTRVLAGTTKPAGKRTADGSEFEKRTADGSEFESPKKKAKVE

SEQ ID NO: 6987 - protein, 2092 aa, synthetic construct
MPAAKRVKLDGGDKKYSIGLDIGTNSVGWAVITDEYKVPSKKFKVLGNTDRHSIKKNLIGALLFDSGETAEATRLKRTARRRYTRRKNRICYLQEIFSNEMAKVDDSFFHRLEESFLVEEDKKHERHPIFGNIVDEVAYHEKYPTIYHLRKKLVDSTDKADLRLIYLALAHMIKFRGHFLIEGDLNPDNSDVDKLFIQLVQTYNQLFEENPINASGVDAKAILSARLSKSRRLENLIAQLPGEKKNGLFGNLIALSLGLTPNFKSNFDLAEDAKLQLSKDTYDDDLDNLLAQIGDQYADLFLAAKNLSDAILLSDILRVNTEITKAPLSASMIKRYDEHHQDLTLLKALVRQQLPEKYKEIFFDQSKNGYAGYIDGGASQEEFYKFIKPILEKMDGTEELLVKLNREDLLRKQRTFDNGSIPHQIHLGELHAILRRQEDFYPFLKDNREKIEKILTFRIPYYVGPLARGNSRFAWMTRKSEETITPWNFEEVVDKGASAQSFIERMTNFDKNLPNEKVLPKHSLLYEYFTVYNELTKVKYVTEGMRKPAFLSGEQKKAIVDLLFKTNRKVTVKQLKEDYFKKIECFDSVEISGVEDRFNASLGTYHDLLKIIKDKDFLDNEENEDILEDIVLTLTLFEDREMIEERLKTYAHLFDDKVMKQLKRRRYTGWGRLSRKLINGIRDKQSGKTILDFLKSDGFANRNFMQLIHDDSLTFKEDIQKAQVSGQGDSLHEHIANLAGSPAIKKGILQTVKVVDELVKVMGRHKPENIVIEMARENQTTQKGQKNSRERMKRIEEGIKELGSQILKEHPVENTQLQNEKLYLYYLQNGRDMYVDQELDINRLSDYDVDHIVPQSFLKDDSIDNKVLTRSDKARGKSDNVPSEEVVKKMKNYWRQLLNAKLITQRKFDNLTKAERGGLSELDKAGFIKRQLVETRQITKHVAQILDSRMNTKYDENDKLIREVKVITLKSKLVSDFRKDFQFYKVREINNYHHAHDAYLNAVVGTALIKKYPKLESEFVYGDYKVYDVRKMIAKSEQEIGKATAKYFFYSNIMNFFKTEITLANGEIRKRPLIETNGETGEIVWDKGRDFATVRKVLSMPQVNIVKKTEVQTGGFSKESILPKRNSDKLIARKKDWDPKKYGGFDSPTVAYSVLVVAKVEKGKSKKLKSVKELLGITIMERSSFEKNPIDFLEAKGYKEVKKDLIIKLPKYSLFELENGRKRMLASAGELQKGNELALPSKYVNFLYLASHYEKLKGSPEDNEQKQLFVEQHKHYLDEIIEQISEFSKRVILADANLDKVLSAYNKHRDKPIREQAENIIHLFTLTNLGAPAAFKYFDTTIDRKRYTSTKEVLDATLIHQSITGLYETRIDLSQLGGDGGGGSPAPGGGGGVLNLEEEYRLHEKPVPSSIDPSWLQLFPTVWAERAGMGLANQVPPVVVELRSGASPVAVRQYPMSKEAREGIRPHIQKFLDLGVLVPCRSPWNTPLLPVKKPGTNDYRPVQDLREINKRVQDIHPTVPNPYNLLSSLPPSYTWYSVLDLKDAFFCLRLHPNSQPLFAFEWKDPEKGNTGQLTWTRLPQGFKNSPTLFNEALHRDLAPFRALNPQVVLLQYVDDLLVAAPTYEDCKKGTQKLLQELSKLGYRVSAKKAQLCQREVTYLGYLLKEGKRWLTPARKATVMKIPVPTTPRQVREFLGTAGFCRLWIPGFASLAAPLYPLTKPSIPFIWTEEHQQAFDHIKKALLSAPALALPDLTKPFTLYIDERAGVARGVLTQTLGPWRRPVAYLSKKLDPVASGWPTCLKAVAAVALLLKDADKLTLGQNVTVIASHSLESIVRQPPDRWMTNARMTHYQSLLLNERVSFAPPAVLNPATLLPVESEATPVHRCSEILAEETGTRRDLEDQPLPGVPTWYTDGSSFITEGKRRAGAPIVDGKRTVWASSLPEGTSAQKAELVALTQALRLAEGKNINIYTDSRYAFATAHIHGAIYKQRGWLTSAGKDIKNKEEILALLEAIHLPRRVAIIHCPGHQRGSNPVATGNRRADEAAKQAALSTRVLAGTTKPAGKRTADGSEFEKRTADGSEFESPKKKAKVE

SEQ ID NO: 6988 - protein, 2125 aa, synthetic construct
MPAAKRVKLDGGDKKYSIGLDIGTNSVGWAVITDEYKVPSKKFKVLGNTDRHSIKKNLIGALLFDSGETAEATRLKRTARRRYTRRKNRICYLQEIFSNEMAKVDDSFFHRLEESFLVEEDKKHERHPIFGNIVDEVAYHEKYPTIYHLRKKLVDSTDKADLRLIYLALAHMIKFRGHFLIEGDLNPDNSDVDKLFIQLVQTYNQLFEENPINASGVDAKAILSARLSKSRRLENLIAQLPGEKKNGLFGNLIALSLGLTPNFKSNFDLAEDAKLQLSKDTYDDDLDNLLAQIGDQYADLFLAAKNLSDAILLSDILRVNTEITKAPLSASMIKRYDEHHQDLTLLKALVRQQLPEKYKEIFFDQSKNGYAGYIDGGASQEEFYKFIKPILEKMDGTEELLVKLNREDLLRKQRTFDNGSIPHQIHLGELHAILRRQEDFYPFLKDNREKIEKILTFRIPYYVGPLARGNSRFAWMTRKSEETITPWNFEEVVDKGASAQSFIERMTNFDKNLPNEKVLPKHSLLYEYFTVYNELTKVKYVTEGMRKPAFLSGEQKKAIVDLLFKTNRKVTVKQLKEDYFKKIECFDSVEISGVEDRFNASLGTYHDLLKIIKDKDFLDNEENEDILEDIVLTLTLFEDREMIEERLKTYAHLFDDKVMKQLKRRRYTGWGRLSRKLINGIRDKQSGKTILDFLKSDGFANRNFMQLIHDDSLTFKEDIQKAQVSGQGDSLHEHIANLAGSPAIKKGILQTVKVVDELVKVMGRHKPENIVIEMARENQTTQKGQKNSRERMKRIEEGIKELGSQILKEHPVENTQLQNEKLYLYYLQNGRDMYVDQELDINRLSDYDVDHIVPQSFLKDDSIDNKVLTRSDKARGKSDNVPSEEVVKKMKNYWRQLLNAKLITQRKFDNLTKAERGGLSELDKAGFIKRQLVETRQITKHVAQILDSRMNTKYDENDKLIREVKVITLKSKLVSDFRKDFQFYKVREINNYHHAHDAYLNAVVGTALIKKYPKLESEFVYGDYKVYDVRKMIAKSEQEIGKATAKYFFYSNIMNFFKTEITLANGEIRKRPLIETNGETGEIVWDKGRDFATVRKVLSMPQVNIVKKTEVQTGGFSKESILPKRNSDKLIARKKDWDPKKYGGFDSPTVAYSVLVVAKVEKGKSKKLKSVKELLGITIMERSSFEKNPIDFLEAKGYKEVKKDLIIKLPKYSLFELENGRKRMLASAGELQKGNELALPSKYVNFLYLASHYEKLKGSPEDNEQKQLFVEQHKHYLDEIIEQISEFSKRVILADANLDKVLSAYNKHRDKPIREQAENIIHLFTLTNLGAPAAFKYFDTTIDRKRYTSTKEVLDATLIHQSITGLYETRIDLSQLGGDGGGGSPAPGGGGGLLGRDLLTKLKAQIQFSTEGPQVTWEDRPAMCLVLNLEEEYRLHEKPVPPSIDPSWLQLFPMVWAEKAGMGLANQVPPVVVELKSDASPVAVRQYPMSKEAREGIRPHIQRFLDLGILVPCQSPWNTPLLPVKKPGTNDYRPVQDLREVNKRVQDIHPTVPNPYNLLSSLPPSHTWYSVLDLKDAFFCLKLHPNSQPLFAFEWRDPEKGNTGQLTWTRLPQGFKNSPTLFNEALHRDLASFRALNPQVVMLQYVDDLLVAAPTYRDCKEGTRRLLQELSKLGYRVSAKKAQLCREEVTYLGYLLKGGKRWLTPARKATVMKIPTPTTPRQVREFLGTAGFCRLWIPGFASLAAPLYPLTRPKVPFTWTEAHQEAFGRIKEALLSAPALALPDLTKPFALYVDEKEGVARGVLTQTLGPWRRPVAYLSKKLDPVASGWPTCLKAIAAVALLLKDADKLTLGQNVLVIAPHNLESIVRQPPDRWMTNARMTHYQSLLLNERVSFAPPAILNPATLLPVESDDTPIHICSEILAEETGTRPDLRDQPLPGVPAWYTDGSSFIMDGRRQAGAAIVDNKRTVWASNLPEGTSAQKAELIALTQALRLAEGKSINIYTDSRYAFATAHVHGAIYKQRGWLTSAGKDIKNKEEILALLEAIHLPKRVAIIHCPGHQRGTDPVATGNRKADEAAKQAAQSTRILTETTKNAGKRTADGSEFEKRTADGSEFESPKKKAKVE

SEQ ID NO: 6989 - protein, 2216 aa, synthetic construct
MPAAKRVKLDGGDKKYSIGLDIGTNSVGWAVITDEYKVPSKKFKVLGNTDRHSIKKNLIGALLFDSGETAEATRLKRTARRRYTRRKNRICYLQEIFSNEMAKVDDSFFHRLEESFLVEEDKKHERHPIFGNIVDEVAYHEKYPTIYHLRKKLVDSTDKADLRLIYLALAHMIKFRGHFLIEGDLNPDNSDVDKLFIQLVQTYNQLFEENPINASGVDAKAILSARLSKSRRLENLIAQLPGEKKNGLFGNLIALSLGLTPNFKSNFDLAEDAKLQLSKDTYDDDLDNLLAQIGDQYADLFLAAKNLSDAILLSDILRVNTEITKAPLSASMIKRYDEHHQDLTLLKALVRQQLPEKYKEIFFDQSKNGYAGYIDGGASQEEFYKFIKPILEKMDGTEELLVKLNREDLLRKQRTFDNGSIPHQIHLGELHAILRRQEDFYPFLKDNREKIEKILTFRIPYYVGPLARGNSRFAWMTRKSEETITPWNFEEVVDKGASAQSFIERMTNFDKNLPNEKVLPKHSLLYEYFTVYNELTKVKYVTEGMRKPAFLSGEQKKAIVDLLFKTNRKVTVKQLKEDYFKKIECFDSVEISGVEDRFNASLGTYHDLLKIIKDKDFLDNEENEDILEDIVLTLTLFEDREMIEERLKTYAHLFDDKVMKQLKRRRYTGWGRLSRKLINGIRDKQSGKTILDFLKSDGFANRNFMQLIHDDSLTFKEDIQKAQVSGQGDSLHEHIANLAGSPAIKKGILQTVKVVDELVKVMGRHKPENIVIEMARENQTTQKGQKNSRERMKRIEEGIKELGSQILKEHPVENTQLQNEKLYLYYLQNGRDMYVDQELDINRLSDYDVDHIVPQSFLKDDSIDNKVLTRSDKARGKSDNVPSEEVVKKMKNYWRQLLNAKLITQRKFDNLTKAERGGLSELDKAGFIKRQLVETRQITKHVAQILDSRMNTKYDENDKLIREVKVITLKSKLVSDFRKDFQFYKVREINNYHHAHDAYLNAVVGTALIKKYPKLESEFVYGDYKVYDVRKMIAKSEQEIGKATAKYFFYSNIMNFFKTEITLANGEIRKRPLIETNGETGEIVWDKGRDFATVRKVLSMPQVNIVKKTEVQTGGFSKESILPKRNSDKLIARKKDWDPKKYGGFDSPTVAYSVLVVAKVEKGKSKKLKSVKELLGITIMERSSFEKNPIDFLEAKGYKEVKKDLIIKLPKYSLFELENGRKRMLASAGELQKGNELALPSKYVNFLYLASHYEKLKGSPEDNEQKQLFVEQHKHYLDEIIEQISEFSKRVILADANLDKVLSAYNKHRDKPIREQAENIIHLFTLTNLGAPAAFKYFDTTIDRKRYTSTKEVLDATLIHQSITGLYETRIDLSQLGGDGGGGSPAPGGGGGTLGDQGSRGSDPLPEPRVTLTVEGIPTEFLVNTGAEHSVLTKPMGKMGSKRTVVAGATGSKVYPWTTKRLLKIGQKQVTHSFLVIPECPAPLLGRDLLTKLKAQIQFSTEGPQVTWEDRPAMCLVLNLEEEYRLHEKPVPPSIDPSWLQLFPMVWAEKAGMGLANQVPPVVVELKSDASPVAVRQYPMSKEAREGIRPHIQRFLDLGILVPCQSPWNTPLLPVKKPGTNDYRPVQDLREVNKRVQDIHPTVPNPYNLLSSLPPSHTWYSVLDLKDAFFCLKLHPNSQPLFAFEWRDPEKGNTGQLTWTRLPQGFKNSPTLFNEALHRDLASFRALNPQVVMLQYVDDLLVAAPTYRDCKEGTRRLLQELSKLGYRVSAKKAQLCREEVTYLGYLLKGGKRWLTPARKATVMKIPTPTTPRQVREFLGTAGFCRLWIPGFASLAAPLYPLTRPKVPFTWTEAHQEAFGRIKEALLSAPALALPDLTKPFALYVDEKEGVARGVLTQTLGPWRRPVAYLSKKLDPVASGWPTCLKAIAAVALLLKDADKLTLGQNVLVIAPHNLESIVRQPPDRWMTNARMTHYQSLLLNERVSFAPPAILNPATLLPVESDDTPIHICSEILAEETGTRPDLRDQPLPGVPAWYTDGSSFIMDGRRQAGAAIVDNKRTVWASNLPEGTSAQKAELIALTQALRLAEGKSINIYTDSRYAFATAHVHGAIYKQRGWLTSAGKDIKNKEEILALLEAIHLPKRVAIIHCPGHQRGTDPVATGNRKADEAAKQAAQSTRILTETTKNAGKRTADGSEFEKRTADGSEFESPKKKAKVE

SEQ ID NO: 6990 - protein, 2088 aa, synthetic construct
MPAAKRVKLDGGDKKYSIGLDIGTNSVGWAVITDEYKVPSKKFKVLGNTDRHSIKKNLIGALLFDSGETAEATRLKRTARRRYTRRKNRICYLQEIFSNEMAKVDDSFFHRLEESFLVEEDKKHERHPIFGNIVDEVAYHEKYPTIYHLRKKLVDSTDKADLRLIYLALAHMIKFRGHFLIEGDLNPDNSDVDKLFIQLVQTYNQLFEENPINASGVDAKAILSARLSKSRRLENLIAQLPGEKKNGLFGNLIALSLGLTPNFKSNFDLAEDAKLQLSKDTYDDDLDNLLAQIGDQYADLFLAAKNLSDAILLSDILRVNTEITKAPLSASMIKRYDEHHQDLTLLKALVRQQLPEKYKEIFFDQSKNGYAGYIDGGASQEEFYKFIKPILEKMDGTEELLVKLNREDLLRKQRTFDNGSIPHQIHLGELHAILRRQEDFYPFLKDNREKIEKILTFRIPYYVGPLARGNSRFAWMTRKSEETITPWNFEEVVDKGASAQSFIERMTNFDKNLPNEKVLPKHSLLYEYFTVYNELTKVKYVTEGMRKPAFLSGEQKKAIVDLLFKTNRKVTVKQLKEDYFKKIECFDSVEISGVEDRFNASLGTYHDLLKIIKDKDFLDNEENEDILEDIVLTLTLFEDREMIEERLKTYAHLFDDKVMKQLKRRRYTGWGRLSRKLINGIRDKQSGKTILDFLKSDGFANRNFMQLIHDDSLTFKEDIQKAQVSGQGDSLHEHIANLAGSPAIKKGILQTVKVVDELVKVMGRHKPENIVIEMARENQTTQKGQKNSRERMKRIEEGIKELGSQILKEHPVENTQLQNEKLYLYYLQNGRDMYVDQELDINRLSDYDVDHIVPQSFLKDDSIDNKVLTRSDKARGKSDNVPSEEVVKKMKNYWRQLLNAKLITQRKFDNLTKAERGGLSELDKAGFIKRQLVETRQITKHVAQILDSRMNTKYDENDKLIREVKVITLKSKLVSDFRKDFQFYKVREINNYHHAHDAYLNAVVGTALIKKYPKLESEFVYGDYKVYDVRKMIAKSEQEIGKATAKYFFYSNIMNFFKTEITLANGEIRKRPLIETNGETGEIVWDKGRDFATVRKVLSMPQVNIVKKTEVQTGGFSKESILPKRNSDKLIARKKDWDPKKYGGFDSPTVAYSVLVVAKVEKGKSKKLKSVKELLGITIMERSSFEKNPIDFLEAKGYKEVKKDLIIKLPKYSLFELENGRKRMLASAGELQKGNELALPSKYVNFLYLASHYEKLKGSPEDNEQKQLFVEQHKHYLDEIIEQISEFSKRVILADANLDKVLSAYNKHRDKPIREQAENIIHLFTLTNLGAPAAFKYFDTTIDRKRYTSTKEVLDATLIHQSITGLYETRIDLSQLGGDGGGGSPAPGGGGGTLQLDDEYRLYSPLVKPDQNIQFWLEQFPQAWAETAGMGLAKQVPPQVIQLKASATPVSVRQYPLSKEAQEGIRPHVQRLIQQGILVPVQSPWNTPLLPVRKPGTNDYRPVQDLREVNKRVQDIHPTVPNPYNLLCALPPQRSWYTVLDLKDAFFCLRLHPTSQPLFAFEWRDPGTGRTGQLTWTRLPQGFKNSPTIFDEALHRDLANFRIQHPQVTLLQYVDDLLLAGATKQDCLEGTKALLLELSDLGYRASAKKAQICRREVTYLGYSLRDGQRWLTEARKKTVVQIPAPTTAKQVREFLGTAGFCRLWIPGFATLAAPLYPLTKEKGEFSWAPEHQKAFDAIKKALLSAPALALPDVTKPFTLYVDERKGVARGVLTQTLGPWRRPVAYLSKKLDPVASGWPVCLKAIAAVAILVKDADKLTLGQNITVIAPHALENIVRQPPDRWMTNARMTHYQSLLLTERVTFAPPAALNPATLLPEETDEPVTHDCHQLLIEETGVRKDLTDIPLTGEVLTWFTDGSSYVVEGKRMAGAAVVDGTRTIWASSLPEGTSAQKAELMALTQALRLAEGKSINIYTDSRYAFATAHVHGAIYKQRGLLTSAGREIKNKEEILSLLEALHLPKRLAIIHCPGHQKAKDPISRGNQMADRVAKQAAQGVNLLAGKRTADGSEFEKRTADGSEFESPKKKAKVE

SEQ ID NO: 6991 - protein, 2174 aa, synthetic construct
MPAAKRVKLDGGDKKYSIGLDIGTNSVGWAVITDEYKVPSKKFKVLGNTDRHSIKKNLIGALLFDSGETAEATRLKRTARRRYTRRKNRICYLQEIFSNEMAKVDDSFFHRLEESFLVEEDKKHERHPIFGNIVDEVAYHEKYPTIYHLRKKLVDSTDKADLRLIYLALAHMIKFRGHFLIEGDLNPDNSDVDKLFIQLVQTYNQLFEENPINASGVDAKAILSARLSKSRRLENLIAQLPGEKKNGLFGNLIALSLGLTPNFKSNFDLAEDAKLQLSKDTYDDDLDNLLAQIGDQYADLFLAAKNLSDAILLSDILRVNTEITKAPLSASMIKRYDEHHQDLTLLKALVRQQLPEKYKEIFFDQSKNGYAGYIDGGASQEEFYKFIKPILEKMDGTEELLVKLNREDLLRKQRTFDNGSIPHQIHLGELHAILRRQEDFYPFLKDNREKIEKILTFRIPYYVGPLARGNSRFAWMTRKSEETITPWNFEEVVDKGASAQSFIERMTNFDKNLPNEKVLPKHSLLYEYFTVYNELTKVKYVTEGMRKPAFLSGEQKKAIVDLLFKTNRKVTVKQLKEDYFKKIECFDSVEISGVEDRFNASLGTYHDLLKIIKDKDFLDNEENEDILEDIVLTLTLFEDREMIEERLKTYAHLFDDKVMKQLKRRRYTGWGRLSRKLINGIRDKQSGKTILDFLKSDGFANRNFMQLIHDDSLTFKEDIQKAQVSGQGDSLHEHIANLAGSPAIKKGILQTVKVVDELVKVMGRHKPENIVIEMARENQTTQKGQKNSRERMKRIEEGIKELGSQILKEHPVENTQLQNEKLYLYYLQNGRDMYVDQELDINRLSDYDVDHIVPQSFLKDDSIDNKVLTRSDKARGKSDNVPSEEVVKKMKNYWRQLLNAKLITQRKFDNLTKAERGGLSELDKAGFIKRQLVETRQITKHVAQILDSRMNTKYDENDKLIREVKVITLKSKLVSDFRKDFQFYKVREINNYHHAHDAYLNAVVGTALIKKYPKLESEFVYGDYKVYDVRKMIAKSEQEIGKATAKYFFYSNIMNFFKTEITLANGEIRKRPLIETNGETGEIVWDKGRDFATVRKVLSMPQVNIVKKTEVQTGGFSKESILPKRNSDKLIARKKDWDPKKYGGFDSPTVAYSVLVVAKVEKGKSKKLKSVKELLGITIMERSSFEKNPIDFLEAKGYKEVKKDLIIKLPKYSLFELENGRKRMLASAGELQKGNELALPSKYVNFLYLASHYEKLKGSPEDNEQKQLFVEQHKHYLDEIIEQISEFSKRVILADANLDKVLSAYNKHRDKPIREQAENIIHLFTLTNLGAPAAFKYFDTTIDRKRYTSTKEVLDATLIHQSITGLYETRIDLSQLGGDGGGGSPAPGGGGGMDPLQLLQPLEAEIKGTKLKAHWNSGATITCVPEAFLEDERPIQTMLIKTIHGEKQQDVYYLTFKVQGRKVEAEVLASPYDYILLNPSDVPWLMKKPLQLTVLVPLHEYQERLLQQTALPKEQKELLQKLFLKYDALWQHWENQVGHRRIKPHNIATGTLAPRPQKQYPINPKAKPSIQIVIDDLLKQGVLIQQNSTMNTPVYPVPKPDGKWRMVLDYREVNKTIPLIAAQNQHSAGILSSIYRGKYKTTLDLTNGFWAHPITPESYWLTAFTWQGKQYCWTRLPQGFLNSPALFNADVVDLLKEIPNVQAYVDDIYISHDDPQEHLEQLEKIFSILLNAGYVVSLKKSEIAQREVEFLGFNITKEGRGLTDTFKQKLLNITPPKDLKQLQSILGLLNFARNFIPNYSELVKPLYTIVAPANGKFISWTEDNSNQLQHIISVLNQADNLEERNPETRLIIKVNSSPSAGYIRYYNEGSKRPIMYVNYIFSKAEAKFTQTEKLLTTMHKGLIKAMDLAMGQEILVYSPIVSMTKIQRTPLPERKALPVRWITWMTYLEDPRIQFHYDKSLPELQQIPNVTEDVIAKTKHPSEFAMVFYTDGSAIKHPDVNKSHSAGMGIAQVQFIPEYKIVHQWSIPLGDHTAQLAEIAAVEFACKKALKISGPVLIVTDSFYVAESANKELPYWKSNGFLNNKKKPLRHVSKWKSIAECLQLKPDIIIMHEKGHQQPMTTLHTEGNNLADKLATQGSYVVHAGKRTADGSEFEKRTADGSEFESPKKKAKVE

SEQ ID NO: 6992 - protein, 2092 aa, synthetic construct
MPAAKRVKLDGGDKKYSIGLDIGTNSVGWAVITDEYKVPSKKFKVLGNTDRHSIKKNLIGALLFDSGETAEATRLKRTARRRYTRRKNRICYLQEIFSNEMAKVDDSFFHRLEESFLVEEDKKHERHPIFGNIVDEVAYHEKYPTIYHLRKKLVDSTDKADLRLIYLALAHMIKFRGHFLIEGDLNPDNSDVDKLFIQLVQTYNQLFEENPINASGVDAKAILSARLSKSRRLENLIAQLPGEKKNGLFGNLIALSLGLTPNFKSNFDLAEDAKLQLSKDTYDDDLDNLLAQIGDQYADLFLAAKNLSDAILLSDILRVNTEITKAPLSASMIKRYDEHHQDLTLLKALVRQQLPEKYKEIFFDQSKNGYAGYIDGGASQEEFYKFIKPILEKMDGTEELLVKLNREDLLRKQRTFDNGSIPHQIHLGELHAILRRQEDFYPFLKDNREKIEKILTFRIPYYVGPLARGNSRFAWMTRKSEETITPWNFEEVVDKGASAQSFIERMTNFDKNLPNEKVLPKHSLLYEYFTVYNELTKVKYVTEGMRKPAFLSGEQKKAIVDLLFKTNRKVTVKQLKEDYFKKIECFDSVEISGVEDRFNASLGTYHDLLKIIKDKDFLDNEENEDILEDIVLTLTLFEDREMIEERLKTYAHLFDDKVMKQLKRRRYTGWGRLSRKLINGIRDKQSGKTILDFLKSDGFANRNFMQLIHDDSLTFKEDIQKAQVSGQGDSLHEHIANLAGSPAIKKGILQTVKVVDELVKVMGRHKPENIVIEMARENQTTQKGQKNSRERMKRIEEGIKELGSQILKEHPVENTQLQNEKLYLYYLQNGRDMYVDQELDINRLSDYDVDHIVPQSFLKDDSIDNKVLTRSDKARGKSDNVPSEEVVKKMKNYWRQLLNAKLITQRKFDNLTKAERGGLSELDKAGFIKRQLVETRQITKHVAQILDSRMNTKYDENDKLIREVKVITLKSKLVSDFRKDFQFYKVREINNYHHAHDAYLNAVVGTALIKKYPKLESEFVYGDYKVYDVRKMIAKSEQEIGKATAKYFFYSNIMNFFKTEITLANGEIRKRPLIETNGETGEIVWDKGRDFATVRKVLSMPQVNIVKKTEVQTGGFSKESILPKRNSDKLIARKKDWDPKKYGGFDSPTVAYSVLVVAKVEKGKSKKLKSVKELLGITIMERSSFEKNPIDFLEAKGYKEVKKDLIIKLPKYSLFELENGRKRMLASAGELQKGNELALPSKYVNFLYLASHYEKLKGSPEDNEQKQLFVEQHKHYLDEIIEQISEFSKRVILADANLDKVLSAYNKHRDKPIREQAENIIHLFTLTNLGAPAAFKYFDTTIDRKRYTSTKEVLDATLIHQSITGLYETRIDLSQLGGDGGGGSPAPGGGGGVLNLEEEYRLHEKPVPSSIDPSWLQLFPTVWAERAGMGLANQVPPVVVELRSGASPVAVRQYPMSKEAREGIRPHIQRFLDLGVLVPCQSPWNTPLLPVKKPGTNDYRPVQDLREINKRVQDIHPTVPNPYNLLSSLPPSHTWYSVLDLKDAFFCLKLHPNSQPLFAFEWRDPEKGNTGQLTWTRLPQGFKNSPTLFDEALHRDLAPFRALNPQVVLLQYVDDLLVAAPTYRDCKEGTQKLLQELSKLGYRVSAKKAQLCQKEVTYLGYLLKEGKRWLTPARKATVMKIPPPTTPRQVREFLGTAGFCRLWIPGFASLAAPLYPLTKESIPFIWTEEHQKAFDRIKEALLSAPALALPDLTKPFTLYVDERAGVARGVLTQTLGPWRRPVAYLSKKLDPVASGWPTCLKAVAAVALLLKDADKLTLGQNVTVIASHSLESIVRQPPDRWMTNARMTHYQSLLLNERVSFAPPAVLNPATLLPVESEATPVHRCSEILAEETGTRRDLKDQPLPGVPAWYTDGSSFIAEGKRRAGAAIVDGKRTVWASSLPEGTSAQKAELVALTQALRLAEGKDINIYTDSRYAFATAHIHGAIYKQRGLLTSAGKDIKNKEEILALLEAIHLPKRVAIIHCPGHQKGNDPVATGNRRADEAAKQAALSTRVLAETTKPAGKRTADGSEFEKRTADGSEFESPKKKAKVE

SEQ ID NO: 6993 - protein, 2100 aa, synthetic construct
MPAAKRVKLDGGDKKYSIGLDIGTNSVGWAVITDEYKVPSKKFKVLGNTDRHSIKKNLIGALLFDSGETAEATRLKRTARRRYTRRKNRICYLQEIFSNEMAKVDDSFFHRLEESFLVEEDKKHERHPIFGNIVDEVAYHEKYPTIYHLRKKLVDSTDKADLRLIYLALAHMIKFRGHFLIEGDLNPDNSDVDKLFIQLVQTYNQLFEENPINASGVDAKAILSARLSKSRRLENLIAQLPGEKKNGLFGNLIALSLGLTPNFKSNFDLAEDAKLQLSKDTYDDDLDNLLAQIGDQYADLFLAAKNLSDAILLSDILRVNTEITKAPLSASMIKRYDEHHQDLTLLKALVRQQLPEKYKEIFFDQSKNGYAGYIDGGASQEEFYKFIKPILEKMDGTEELLVKLNREDLLRKQRTFDNGSIPHQIHLGELHAILRRQEDFYPFLKDNREKIEKILTFRIPYYVGPLARGNSRFAWMTRKSEETITPWNFEEVVDKGASAQSFIERMTNFDKNLPNEKVLPKHSLLYEYFTVYNELTKVKYVTEGMRKPAFLSGEQKKAIVDLLFKTNRKVTVKQLKEDYFKKIECFDSVEISGVEDRFNASLGTYHDLLKIIKDKDFLDNEENEDILEDIVLTLTLFEDREMIEERLKTYAHLFDDKVMKQLKRRRYTGWGRLSRKLINGIRDKQSGKTILDFLKSDGFANRNFMQLIHDDSLTFKEDIQKAQVSGQGDSLHEHIANLAGSPAIKKGILQTVKVVDELVKVMGRHKPENIVIEMARENQTTQKGQKNSRERMKRIEEGIKELGSQILKEHPVENTQLQNEKLYLYYLQNGRDMYVDQELDINRLSDYDVDHIVPQSFLKDDSIDNKVLTRSDKARGKSDNVPSEEVVKKMKNYWRQLLNAKLITQRKFDNLTKAERGGLSELDKAGFIKRQLVETRQITKHVAQILDSRMNTKYDENDKLIREVKVITLKSKLVSDFRKDFQFYKVREINNYHHAHDAYLNAVVGTALIKKYPKLESEFVYGDYKVYDVRKMIAKSEQEIGKATAKYFFYSNIMNFFKTEITLANGEIRKRPLIETNGETGEIVWDKGRDFATVRKVLSMPQVNIVKKTEVQTGGFSKESILPKRNSDKLIARKKDWDPKKYGGFDSPTVAYSVLVVAKVEKGKSKKLKSVKELLGITIMERSSFEKNPIDFLEAKGYKEVKKDLIIKLPKYSLFELENGRKRMLASAGELQKGNELALPSKYVNFLYLASHYEKLKGSPEDNEQKQLFVEQHKHYLDEIIEQISEFSKRVILADANLDKVLSAYNKHRDKPIREQAENIIHLFTLTNLGAPAAFKYFDTTIDRKRYTSTKEVLDATLIHQSITGLYETRIDLSQLGGDGGGGGGGSPAPGGTVSLQDEHRLFDIPVTTSLPDVWLQDFPQAWAETGGLGRAKCQAPIIIDLKPTAVPVSIKQYPMSLEAHMGIRQHIIKFLELGVLRPCRSPWNTPLLPVKKPGTQDYRPVQDLREINKRTVDIHPTVPNPYNLLSTLKPDYSWYTVLDLKDAFFCLPLAPQSQELFAFEWKDPERGISGQLTWTRLPQGFKNSPTLFNEALHRDLTDFRTQHPEVTLLQYVDDLLLAAPTKKACTQGTRHLLQELGEKGYRASAKKAQICQTKVTYLGYILSEGKRWLTPGRIETVARIPPPRNPREVREFLGTAGFCRLWIPGFAELAAPLYALTKPSTPFTWQTEHQLAFEALKKALLSAPALGLPDTSKPFTLFLDERQGIAKGVLTQKLGPWKRPVAYLSKKLDPVAAGWPPCLRIMAATAMLVKDSAKLTLGQPLTVITPHTLEAIVRQPPDRWITNARLTHYQALLLDTDRVQFGPPVTLNPATLLPVPENQPSPHDCRQVLAETHGTREDLKDQELPDADHTWYTDGSSYLDSGTRRAGAAVVDGHNTIWAQSLPPGTSAQKAELIALTKALELSKGKKANIYTDSRYAFATAHTHGSIYERRGWLTSEGKEIKNKAEIIALLKALFLPQEVAIIHCPGHQKGQDPVAVGNRQADRVARQAAMAEVLTLATEPDNTSHITAGKRTADGSEFEKRTADGSEFESPKKKAKVE

SEQ ID NO: 6994 - protein, 2171 aa, synthetic construct
MPAAKRVKLDGGDKKYSIGLDIGTNSVGWAVITDEYKVPSKKFKVLGNTDRHSIKKNLIGALLFDSGETAEATRLKRTARRRYTRRKNRICYLQEIFSNEMAKVDDSFFHRLEESFLVEEDKKHERHPIFGNIVDEVAYHEKYPTIYHLRKKLVDSTDKADLRLIYLALAHMIKFRGHFLIEGDLNPDNSDVDKLFIQLVQTYNQLFEENPINASGVDAKAILSARLSKSRRLENLIAQLPGEKKNGLFGNLIALSLGLTPNFKSNFDLAEDAKLQLSKDTYDDDLDNLLAQIGDQYADLFLAAKNLSDAILLSDILRVNTEITKAPLSASMIKRYDEHHQDLTLLKALVRQQLPEKYKEIFFDQSKNGYAGYIDGGASQEEFYKFIKPILEKMDGTEELLVKLNREDLLRKQRTFDNGSIPHQIHLGELHAILRRQEDFYPFLKDNREKIEKILTFRIPYYVGPLARGNSRFAWMTRKSEETITPWNFEEVVDKGASAQSFIERMTNFDKNLPNEKVLPKHSLLYEYFTVYNELTKVKYVTEGMRKPAFLSGEQKKAIVDLLFKTNRKVTVKQLKEDYFKKIECFDSVEISGVEDRFNASLGTYHDLLKIIKDKDFLDNEENEDILEDIVLTLTLFEDREMIEERLKTYAHLFDDKVMKQLKRRRYTGWGRLSRKLINGIRDKQSGKTILDFLKSDGFANRNFMQLIHDDSLTFKEDIQKAQVSGQGDSLHEHIANLAGSPAIKKGILQTVKVVDELVKVMGRHKPENIVIEMARENQTTQKGQKNSRERMKRIEEGIKELGSQILKEHPVENTQLQNEKLYLYYLQNGRDMYVDQELDINRLSDYDVDHIVPQSFLKDDSIDNKVLTRSDKARGKSDNVPSEEVVKKMKNYWRQLLNAKLITQRKFDNLTKAERGGLSELDKAGFIKRQLVETRQITKHVAQILDSRMNTKYDENDKLIREVKVITLKSKLVSDFRKDFQFYKVREINNYHHAHDAYLNAVVGTALIKKYPKLESEFVYGDYKVYDVRKMIAKSEQEIGKATAKYFFYSNIMNFFKTEITLANGEIRKRPLIETNGETGEIVWDKGRDFATVRKVLSMPQVNIVKKTEVQTGGFSKESILPKRNSDKLIARKKDWDPKKYGGFDSPTVAYSVLVVAKVEKGKSKKLKSVKELLGITIMERSSFEKNPIDFLEAKGYKEVKKDLIIKLPKYSLFELENGRKRMLASAGELQKGNELALPSKYVNFLYLASHYEKLKGSPEDNEQKQLFVEQHKHYLDEIIEQISEFSKRVILADANLDKVLSAYNKHRDKPIREQAENIIHLFTLTNLGAPAAFKYFDTTIDRKRYTSTKEVLDATLIHQSITGLYETRIDLSQLGGDGGGGGGGSPAPGGMDLLKPLTVERKGVKIKGYWNSQADITCVPKDLLQGEEPVRQQNVTTIHGTQEGDVYYVNLKIDGRRINTEVIGTTLDYAIITPGDVPWILKKPLELTIKLDLEEQQGTLLNNSILSKKGKEELKQLFEKYSALWQSWENQVGHRRIRPHKIATGTVKPTPQKQYHINPKAKPDIQIVINDLLKQGVLIQKESTMNTPVYPVPKPNGRWRMVLDYRAVNKVTPLIAVQNQHSYGILGSLFKGRYKTTIDLSNGFWAHPIVPEDYWITAFTWQGKQYCWTVLPQGFLNSPGLFTGDVVDLLQGIPNVEVYVDDVYISHDSEKEHLEYLDILFNRLKEAGYIISLKKSNIANSIVDFLGFQITNEGRGLTDTFKEKLENITAPTTLKQLQSILGLLNFARNFIPDFTELIAPLYALIPKSTKNYVPWQIEHSTTLETLITKLNGAEYLQGRKGDKTLIMKVNASYTTGYIRYYNEGEKKPISYVSIVFSKTELKFTELEKLLTTVHKGLLKALDLSMGQNIHVYSPIVSMQNIQKTPQTAKKALASRWLSWLSYLEDPRIRFFYDPQMPALKDLPAVDTGKDNKKHPSNFQHIFYTDGSAITSPTKEGHLNAGMGIVYFINKDGNLQKQQEWSISLGNHTAQFAEIAAFEFALKKCLPLGGNILVVTDSNYVAKAYNEELDVWASNGFVNNRKKPLKHISKWKSVADLKRLRPDVVVTHEPGHQKLDSSPHAYGNNLADQLATQASFKVHAGKRTADGSEFEKRTADGSEFESPKKKAKVE

SEQ ID NO: 6995 - protein, 2093 aa, synthetic construct
MPAAKRVKLDGGDKKYSIGLDIGTNSVGWAVITDEYKVPSKKFKVLGNTDRHSIKKNLIGALLFDSGETAEATRLKRTARRRYTRRKNRICYLQEIFSNEMAKVDDSFFHRLEESFLVEEDKKHERHPIFGNIVDEVAYHEKYPTIYHLRKKLVDSTDKADLRLIYLALAHMIKFRGHFLIEGDLNPDNSDVDKLFIQLVQTYNQLFEENPINASGVDAKAILSARLSKSRRLENLIAQLPGEKKNGLFGNLIALSLGLTPNFKSNFDLAEDAKLQLSKDTYDDDLDNLLAQIGDQYADLFLAAKNLSDAILLSDILRVNTEITKAPLSASMIKRYDEHHQDLTLLKALVRQQLPEKYKEIFFDQSKNGYAGYIDGGASQEEFYKFIKPILEKMDGTEELLVKLNREDLLRKQRTFDNGSIPHQIHLGELHAILRRQEDFYPFLKDNREKIEKILTFRIPYYVGPLARGNSRFAWMTRKSEETITPWNFEEVVDKGASAQSFIERMTNFDKNLPNEKVLPKHSLLYEYFTVYNELTKVKYVTEGMRKPAFLSGEQKKAIVDLLFKTNRKVTVKQLKEDYFKKIECFDSVEISGVEDRFNASLGTYHDLLKIIKDKDFLDNEENEDILEDIVLTLTLFEDREMIEERLKTYAHLFDDKVMKQLKRRRYTGWGRLSRKLINGIRDKQSGKTILDFLKSDGFANRNFMQLIHDDSLTFKEDIQKAQVSGQGDSLHEHIANLAGSPAIKKGILQTVKVVDELVKVMGRHKPENIVIEMARENQTTQKGQKNSRERMKRIEEGIKELGSQILKEHPVENTQLQNEKLYLYYLQNGRDMYVDQELDINRLSDYDVDHIVPQSFLKDDSIDNKVLTRSDKARGKSDNVPSEEVVKKMKNYWRQLLNAKLITQRKFDNLTKAERGGLSELDKAGFIKRQLVETRQITKHVAQILDSRMNTKYDENDKLIREVKVITLKSKLVSDFRKDFQFYKVREINNYHHAHDAYLNAVVGTALIKKYPKLESEFVYGDYKVYDVRKMIAKSEQEIGKATAKYFFYSNIMNFFKTEITLANGEIRKRPLIETNGETGEIVWDKGRDFATVRKVLSMPQVNIVKKTEVQTGGFSKESILPKRNSDKLIARKKDWDPKKYGGFDSPTVAYSVLVVAKVEKGKSKKLKSVKELLGITIMERSSFEKNPIDFLEAKGYKEVKKDLIIKLPKYSLFELENGRKRMLASAGELQKGNELALPSKYVNFLYLASHYEKLKGSPEDNEQKQLFVEQHKHYLDEIIEQISEFSKRVILADANLDKVLSAYNKHRDKPIREQAENIIHLFTLTNLGAPAAFKYFDTTIDRKRYTSTKEVLDATLIHQSITGLYETRIDLSQLGGDGGGGGGGSPAPGGTLQLEEEYRLFEPESTQKQEMDIWLKNFPQAWAETGGMGTAHCQAPVLIQLKATATPISIRQYPMPHEAYQGIKPHIRRMLDQGILKPCQSPWNTPLLPVKKPGTEDYRPVQDLREVNKRVEDIHPTVPNPYNLLSTLPPSHPWYTVLDLKDAFFCLRLHSESQLLFAFEWRDPEIGLSGQLTWTRLPQGFKNSPTLFDEALHSDLADFRVRYPALVLLQYVDDLLLAAATRTECLEGTKALLETLGNKGYRASAKKAQICLQEVTYLGYSLKDGQRWLTKARKEAILSIPVPKNSRQVREFLGTAGYCRLWIPGFAELAAPLYPLTRPGTLFQWGTEQQLAFEDIKKALLSSPALGLPDITKPFELFIDENSGFAKGVLVQKLGPWKRPVAYLSKKLDTVASGWPPCLRMVAAIAILVKDAGKLTLGQPLTILTSHPVEALVRQPPNKWLSNARMTHYQAMLLDAERVHFGPTVSLNPATLLPLPSGGNHHDCLQILAETHGTRPDLTDQPLPDADLTWYTDGSSFIRNGEREAGAAVTTESEVIWAAPLPPGTSAQRAELIALTQALKMAEGKKLTVYTDSRYAFATTHVHGEIYRRRGLLTSEGKEIKNKNEILALLEALFLPKRLSIIHCPGHQKGDSPQAKGNRLADDTAKKAATETHSSLTVLPAGKRTADGSEFEKRTADGSEFESPKKKAKVE

SEQ ID NO: 6996 - protein, 2085 aa, synthetic construct
MPAAKRVKLDGGDKKYSIGLDIGTNSVGWAVITDEYKVPSKKFKVLGNTDRHSIKKNLIGALLFDSGETAEATRLKRTARRRYTRRKNRICYLQEIFSNEMAKVDDSFFHRLEESFLVEEDKKHERHPIFGNIVDEVAYHEKYPTIYHLRKKLVDSTDKADLRLIYLALAHMIKFRGHFLIEGDLNPDNSDVDKLFIQLVQTYNQLFEENPINASGVDAKAILSARLSKSRRLENLIAQLPGEKKNGLFGNLIALSLGLTPNFKSNFDLAEDAKLQLSKDTYDDDLDNLLAQIGDQYADLFLAAKNLSDAILLSDILRVNTEITKAPLSASMIKRYDEHHQDLTLLKALVRQQLPEKYKEIFFDQSKNGYAGYIDGGASQEEFYKFIKPILEKMDGTEELLVKLNREDLLRKQRTFDNGSIPHQIHLGELHAILRRQEDFYPFLKDNREKIEKILTFRIPYYVGPLARGNSRFAWMTRKSEETITPWNFEEVVDKGASAQSFIERMTNFDKNLPNEKVLPKHSLLYEYFTVYNELTKVKYVTEGMRKPAFLSGEQKKAIVDLLFKTNRKVTVKQLKEDYFKKIECFDSVEISGVEDRFNASLGTYHDLLKIIKDKDFLDNEENEDILEDIVLTLTLFEDREMIEERLKTYAHLFDDKVMKQLKRRRYTGWGRLSRKLINGIRDKQSGKTILDFLKSDGFANRNFMQLIHDDSLTFKEDIQKAQVSGQGDSLHEHIANLAGSPAIKKGILQTVKVVDELVKVMGRHKPENIVIEMARENQTTQKGQKNSRERMKRIEEGIKELGSQILKEHPVENTQLQNEKLYLYYLQNGRDMYVDQELDINRLSDYDVDHIVPQSFLKDDSIDNKVLTRSDKARGKSDNVPSEEVVKKMKNYWRQLLNAKLITQRKFDNLTKAERGGLSELDKAGFIKRQLVETRQITKHVAQILDSRMNTKYDENDKLIREVKVITLKSKLVSDFRKDFQFYKVREINNYHHAHDAYLNAVVGTALIKKYPKLESEFVYGDYKVYDVRKMIAKSEQEIGKATAKYFFYSNIMNFFKTEITLANGEIRKRPLIETNGETGEIVWDKGRDFATVRKVLSMPQVNIVKKTEVQTGGFSKESILPKRNSDKLIARKKDWDPKKYGGFDSPTVAYSVLVVAKVEKGKSKKLKSVKELLGITIMERSSFEKNPIDFLEAKGYKEVKKDLIIKLPKYSLFELENGRKRMLASAGELQKGNELALPSKYVNFLYLASHYEKLKGSPEDNEQKQLFVEQHKHYLDEIIEQISEFSKRVILADANLDKVLSAYNKHRDKPIREQAENIIHLFTLTNLGAPAAFKYFDTTIDRKRYTSTKEVLDATLIHQSITGLYETRIDLSQLGGDGGGGGGGSPAPGGVPWLTQQPLQLTILVPLQEYQEKILSKTALPEDQKQQLKTLFVKYDNLWQHWENQVGHRKIRPHNIATGDYPPRPQKQYPINPKAKPSIQIVIDDLLKQGVLTPQNSTMNTPVYPVPKPDGRWRMVLDYREVNKTIPLTAAQNQHSAGILATIVRQKYKTTLDLANGFWAHPITPESYWLTAFTWQGKQYCWTRLPQGFLNSPALFNADVVDLLKEIPNVQVYVDDIYLSHDDPKEHVQQLEKVFQILLQAGYVVSLKKSEIGQKTVEFLGFNITKEGRGLTDTFKTKLLNITPPKDLKQLQSILGLLNFARNFIPNFAELVQPLYNLIAPAKGKYIEWSEENTKQLNMVIEALNTASNLEERLPEQRLVIKVNTSPSAGYVRYYNETGKKPIMYLNYVFSKAELKFSMLEKLLTTMHKALIKAMDLAMGQEILVYSPIVSMTKIQKTPLPERKALPIRWITWMTYLEDPRIQFHYDKTLPELKHIPDVYTSSQSPVKHPSQYEGVFYTDGSAIKSPDPTKSNNAGMGIVHATYKPEYQVLNQWSIPLGNHTAQMAEIAAVEFACKKALKIPGPVLVITDSFYVAESANKELPYWKSNGFVNNKKKPLKHISKWKSIAECLSMKPDITIQHEKGISLQIPVFILKGNALADKLATQGSYVVNAGKRTADGSEFEKRTADGSEFESPKKKAKVE

SEQ ID NO: 6997 - protein, 2085 aa, synthetic construct
MPAAKRVKLDGGDKKYSIGLDIGTNSVGWAVITDEYKVPSKKFKVLGNTDRHSIKKNLIGALLFDSGETAEATRLKRTARRRYTRRKNRICYLQEIFSNEMAKVDDSFFHRLEESFLVEEDKKHERHPIFGNIVDEVAYHEKYPTIYHLRKKLVDSTDKADLRLIYLALAHMIKFRGHFLIEGDLNPDNSDVDKLFIQLVQTYNQLFEENPINASGVDAKAILSARLSKSRRLENLIAQLPGEKKNGLFGNLIALSLGLTPNFKSNFDLAEDAKLQLSKDTYDDDLDNLLAQIGDQYADLFLAAKNLSDAILLSDILRVNTEITKAPLSASMIKRYDEHHQDLTLLKALVRQQLPEKYKEIFFDQSKNGYAGYIDGGASQEEFYKFIKPILEKMDGTEELLVKLNREDLLRKQRTFDNGSIPHQIHLGELHAILRRQEDFYPFLKDNREKIEKILTFRIPYYVGPLARGNSRFAWMTRKSEETITPWNFEEVVDKGASAQSFIERMTNFDKNLPNEKVLPKHSLLYEYFTVYNELTKVKYVTEGMRKPAFLSGEQKKAIVDLLFKTNRKVTVKQLKEDYFKKIECFDSVEISGVEDRFNASLGTYHDLLKIIKDKDFLDNEENEDILEDIVLTLTLFEDREMIEERLKTYAHLFDDKVMKQLKRRRYTGWGRLSRKLINGIRDKQSGKTILDFLKSDGFANRNFMQLIHDDSLTFKEDIQKAQVSGQGDSLHEHIANLAGSPAIKKGILQTVKVVDELVKVMGRHKPENIVIEMARENQTTQKGQKNSRERMKRIEEGIKELGSQILKEHPVENTQLQNEKLYLYYLQNGRDMYVDQELDINRLSDYDVDHIVPQSFLKDDSIDNKVLTRSDKARGKSDNVPSEEVVKKMKNYWRQLLNAKLITQRKFDNLTKAERGGLSELDKAGFIKRQLVETRQITKHVAQILDSRMNTKYDENDKLIREVKVITLKSKLVSDFRKDFQFYKVREINNYHHAHDAYLNAVVGTALIKKYPKLESEFVYGDYKVYDVRKMIAKSEQEIGKATAKYFFYSNIMNFFKTEITLANGEIRKRPLIETNGETGEIVWDKGRDFATVRKVLSMPQVNIVKKTEVQTGGFSKESILPKRNSDKLIARKKDWDPKKYGGFDSPTVAYSVLVVAKVEKGKSKKLKSVKELLGITIMERSSFEKNPIDFLEAKGYKEVKKDLIIKLPKYSLFELENGRKRMLASAGELQKGNELALPSKYVNFLYLASHYEKLKGSPEDNEQKQLFVEQHKHYLDEIIEQISEFSKRVILADANLDKVLSAYNKHRDKPIREQAENIIHLFTLTNLGAPAAFKYFDTTIDRKRYTSTKEVLDATLIHQSITGLYETRIDLSQLGGDGGGGGGGSPAPGGVPWLTQQPLQLTILVPLQEYQEKILSKTALPEDQKQQLKTLFVKYDNLWQHWENQVGHRKIRPHNIATGDYPPRPQKQYPINPKAKPSIQIVIDDLLKQGVLTPQNSTMNTPVYPVPKPDGRWRMVLDYREVNKTIPLTAAQNQHSAGILATIVRQKYKTTLDLANGFWAHPITPESYWLTAFTWQGKQYCWTRLPQGFLNSPALFNADVVDLLKEIPNVQVYVDDIYLSHDDPKEHVQQLEKVFQILLQAGYVVSLKKSEIGQKTVEFLGFNITKEGRGLTDTFKTKLLNITPPKDLKQLQSILGKLNFARNFIPNFAELVQPLYNLIAPAKGKYIEWSEENTKQLNMVIEALNTASNLEERLPEQRLVIKVNTSPSAGYVRYYNETGKKPIMYLNYVFSKAELKFSMLEKLLTTMHKALIKAMDLAMGQEILVYSPIVSMTKIQKTPLPERKALPIRWITWMTYLEDPRIQFHYDKTLPELKHIPDVYTSSQSPVKHPSQYEGVFYTDGSAIKSPDPTKSNNAGMGIVHATYKPEYQVLNQWSIPLGNHTAQMAEIAAVEFACKKALKIPGPVLVITDSFYVAESANKELPYWKSNGFVNNKKKPLKHISKWKSIAECLSMKPDITIQHEKGISLQIPVFILKGNALADKLATQGSYVVNAGKRTADGSEFEKRTADGSEFESPKKKAKVE

SEQ ID NO: 6998 - protein, 2094 aa, synthetic construct; identical to SEQ ID NO: 4520

SEQ ID NO: 6999 - protein, 2094 aa, synthetic construct
MPAAKRVKLDGGDKKYSIGLDIGTNSVGWAVITDEYKVPSKKFKVLGNTDRHSIKKNLIGALLFDSGETAEATRLKRTARRRYTRRKNRICYLQEIFSNEMAKVDDSFFHRLEESFLVEEDKKHERHPIFGNIVDEVAYHEKYPTIYHLRKKLVDSTDKADLRLIYLALAHMIKFRGHFLIEGDLNPDNSDVDKLFIQLVQTYNQLFEENPINASGVDAKAILSARLSKSRRLENLIAQLPGEKKNGLFGNLIALSLGLTPNFKSNFDLAEDAKLQLSKDTYDDDLDNLLAQIGDQYADLFLAAKNLSDAILLSDILRVNTEITKAPLSASMIKRYDEHHQDLTLLKALVRQQLPEKYKEIFFDQSKNGYAGYIDGGASQEEFYKFIKPILEKMDGTEELLVKLNREDLLRKQRTFDNGSIPHQIHLGELHAILRRQEDFYPFLKDNREKIEKILTFRIPYYVGPLARGNSRFAWMTRKSEETITPWNFEEVVDKGASAQSFIERMTNFDKNLPNEKVLPKHSLLYEYFTVYNELTKVKYVTEGMRKPAFLSGEQKKAIVDLLFKTNRKVTVKQLKEDYFKKIECFDSVEISGVEDRFNASLGTYHDLLKIIKDKDFLDNEENEDILEDIVLTLTLFEDREMIEERLKTYAHLFDDKVMKQLKRRRYTGWGRLSRKLINGIRDKQSGKTILDFLKSDGFANRNFMQLIHDDSLTFKEDIQKAQVSGQGDSLHEHIANLAGSPAIKKGILQTVKVVDELVKVMGRHKPENIVIEMARENQTTQKGQKNSRERMKRIEEGIKELGSQILKEHPVENTQLQNEKLYLYYLQNGRDMYVDQELDINRLSDYDVDHIVPQSFLKDDSIDNKVLTRSDKARGKSDNVPSEEVVKKMKNYWRQLLNAKLITQRKFDNLTKAERGGLSELDKAGFIKRQLVETRQITKHVAQILDSRMNTKYDENDKLIREVKVITLKSKLVSDFRKDFQFYKVREINNYHHAHDAYLNAVVGTALIKKYPKLESEFVYGDYKVYDVRKMIAKSEQEIGKATAKYFFYSNIMNFFKTEITLANGEIRKRPLIETNGETGEIVWDKGRDFATVRKVLSMPQVNIVKKTEVQTGGFSKESILPKRNSDKLIARKKDWDPKKYGGFDSPTVAYSVLVVAKVEKGKSKKLKSVKELLGITIMERSSFEKNPIDFLEAKGYKEVKKDLIIKLPKYSLFELENGRKRMLASAGELQKGNELALPSKYVNFLYLASHYEKLKGSPEDNEQKQLFVEQHKHYLDEIIEQISEFSKRVILADANLDKVLSAYNKHRDKPIREQAENIIHLFTLTNLGAPAAFKYFDTTIDRKRYTSTKEVLDATLIHQSITGLYETRIDLSQLGGDGGGGGGGSPAPGGTLGIEDEYRLHETSTEPDVSLGSTWLSDFPQAWAETGGMGLAVRQAPLIIPLKATSTPVSIQQYPMSHEARLGIKPHIQRLLDQGILVPCQSPWNTPLLPVKKPGTNDYRPVQDLREVNKRVEDIHPTVPNPYNLLSGLPPSHQWYTVLDLKDAFFCLRLHPTSQPLFAFEWRDPGMGISGQLTWTRLPQGFKNSPTLFNEALHRDLADFRIQHPDLILLQYVDDILLAATSELDCQQGTRALLQTLGDLGYRASAKKAQICQKQVKYLGYLLREGQRWLTEARKETVMGQPVPKTPRQLREFLGTAGFCRLWIPGFAEMAAPLYPLTKPGTLFSWGPDQQKAYQEIKQALLTAPALGLPDLTKPFELFVDEKQGYAKGVLTQKLGPWRRPVAYLSKKLDPVAAGWPPCLRMVAAIAVLTKDAGKLTMGQPLVILAPHAVEALVKQPPDRWLSNARMTHYQAMLLDTDRVQFGPVVALNPATLLPLPEEGAPHDCLEILAETHGTRPDLTDQPIPDADHTWYTDGSSFLQEGQRKAGAAVTTETEVIWAGALPAGTSAQRAELIALTQALKMAEGKRLNVYTDSRYAFATAHIHGEIYRRRGWLTSEGREIKNKSEILALLKALFLPKRLSIIHCLGHQKGDSAEARGNRLADQAAREAAIKTPPDTSTLLAGKRTADGSEFEKRTADGSEFESPKKKAKVE

SEQ ID NO: 7000 - protein, 2094 aa, synthetic construct
MPAAKRVKLDGGDKKYSIGLDIGTNSVGWAVITDEYKVPSKKFKVLGNTDRHSIKKNLIGALLFDSGETAEATRLKRTARRRYTRRKNRICYLQEIFSNEMAKVDDSFFHRLEESFLVEEDKKHERHPIFGNIVDEVAYHEKYPTIYHLRKKLVDSTDKADLRLIYLALAHMIKFRGHFLIEGDLNPDNSDVDKLFIQLVQTYNQLFEENPINASGVDAKAILSARLSKSRRLENLIAQLPGEKKNGLFGNLIALSLGLTPNFKSNFDLAEDAKLQLSKDTYDDDLDNLLAQIGDQYADLFLAAKNLSDAILLSDILRVNTEITKAPLSASMIKRYDEHHQDLTLLKALVRQQLPEKYKEIFFDQSKNGYAGYIDGGASQEEFYKFIKPILEKMDGTEELLVKLNREDLLRKQRTFDNGSIPHQIHLGELHAILRRQEDFYPFLKDNREKIEKILTFRIPYYVGPLARGNSRFAWMTRKSEETITPWNFEEVVDKGASAQSFIERMTNFDKNLPNEKVLPKHSLLYEYFTVYNELTKVKYVTEGMRKPAFLSGEQKKAIVDLLFKTNRKVTVKQLKEDYFKKIECFDSVEISGVEDRFNASLGTYHDLLKIIKDKDFLDNEENEDILEDIVLTLTLFEDREMIEERLKTYAHLFDDKVMKQLKRRRYTGWGRLSRKLINGIRDKQSGKTILDFLKSDGFANRNFMQLIHDDSLTFKEDIQKAQVSGQGDSLHEHIANLAGSPAIKKGILQTVKVVDELVKVMGRHKPENIVIEMARENQTTQKGQKNSRERMKRIEEGIKELGSQILKEHPVENTQLQNEKLYLYYLQNGRDMYVDQELDINRLSDYDVDHIVPQSFLKDDSIDNKVLTRSDKARGKSDNVPSEEVVKKMKNYWRQLLNAKLITQRKFDNLTKAERGGLSELDKAGFIKRQLVETRQITKHVAQILDSRMNTKYDENDKLIREVKVITLKSKLVSDFRKDFQFYKVREINNYHHAHDAYLNAVVGTALIKKYPKLESEFVYGDYKVYDVRKMIAKSEQEIGKATAKYFFYSNIMNFFKTEITLANGEIRKRPLIETNGETGEIVWDKGRDFATVRKVLSMPQVNIVKKTEVQTGGFSKESILPKRNSDKLIARKKDWDPKKYGGFDSPTVAYSVLVVAKVEKGKSKKLKSVKELLGITIMERSSFEKNPIDFLEAKGYKEVKKDLIIKLPKYSLFELENGRKRMLASAGELQKGNELALPSKYVNFLYLASHYEKLKGSPEDNEQKQLFVEQHKHYLDEIIEQISEFSKRVILADANLDKVLSAYNKHRDKPIREQAENIIHLFTLTNLGAPAAFKYFDTTIDRKRYTSTKEVLDATLIHQSITGLYETRIDLSQLGGDGGGGGGGSPAPGGTLNIEDEYRLHETSKEPDVSLGSTWLSDFPQAWAETGGMGLAVRQAPLIIPLKATSTPVSIKQYPMSQEARLGIKPHIQRLLDQGILVPCQSPWNTPLLPVKKPGTNDYRPVQDLREVNKRVEDIHPTVPNPYNLLSGLPPSHQWYTVLDLKDAFFCLRLHPTSQPLFAFEWRDPEMGISGQLTWTRLPQGFKNSPTLFDEALHRDLAGFRIQHPDLILLQYVDDLLLAATSELDCQQGTRALLQTLGDLGYRASAKKAQICQKQVKYLGYLLKEGQRWLTEARKETVMGQPIPKTPRQLREFLGTAGFCRLWIPGFAEMAAPLYPLTKTGTLFNWGPDQQKAFQEIKQALLTAPALGLPDLTKPFELFVDEKQGYAKGVLTQKLGPWRRPVAYLSKKLDPVAAGWPPCLRMVAAIAVLTKDAGKLTMGQPLVILAPHAVEALVKQPPDRWLSNARMTHYQALLLDTDRVQFGPVVALNPATLLPLPEEGLQHDCLDILAEAHGTRSDLMDQPLPDADHTWYTDGSSFLQEGQRKAGAAVTTETEVIWARALPAGTSAQRAELIALTQALKMAEGKKLNVYTDSRYAFATAHIHGEIYRRRGLLTSEGKEIKNKDEILALLKALFLPKRLSIIHCPGHQKGNSAEARGNRMADQAAREVATRETPETSTLLAGKRTADGSEFEKRTADGSEFESPKKKAKVE

SEQ ID NO: 7001 - protein, 2094 aa, synthetic construct
MPAAKRVKLDGGDKKYSIGLDIGTNSVGWAVITDEYKVPSKKFKVLGNTDRHSIKKNLIGALLFDSGETAEATRLKRTARRRYTRRKNRICYLQEIFSNEMAKVDDSFFHRLEESFLVEEDKKHERHPIFGNIVDEVAYHEKYPTIYHLRKKLVDSTDKADLRLIYLALAHMIKFRGHFLIEGDLNPDNSDVDKLFIQLVQTYNQLFEENPINASGVDAKAILSARLSKSRRLENLIAQLPGEKKNGLFGNLIALSLGLTPNFKSNFDLAEDAKLQLSKDTYDDDLDNLLAQIGDQYADLFLAAKNLSDAILLSDILRVNTEITKAPLSASMIKRYDEHHQDLTLLKALVRQQLPEKYKEIFFDQSKNGYAGYIDGGASQEEFYKFIKPILEKMDGTEELLVKLNREDLLRKQRTFDNGSIPHQIHLGELHAILRRQEDFYPFLKDNREKIEKILTFRIPYYVGPLARGNSRFAWMTRKSEETITPWNFEEVVDKGASAQSFIERMTNFDKNLPNEKVLPKHSLLYEYFTVYNELTKVKYVTEGMRKPAFLSGEQKKAIVDLLFKTNRKVTVKQLKEDYFKKIECFDSVEISGVEDRFNASLGTYHDLLKIIKDKDFLDNEENEDILEDIVLTLTLFEDREMIEERLKTYAHLFDDKVMKQLKRRRYTGWGRLSRKLINGIRDKQSGKTILDFLKSDGFANRNFMQLIHDDSLTFKEDIQKAQVSGQGDSLHEHIANLAGSPAIKKGILQTVKVVDELVKVMGRHKPENIVIEMARENQTTQKGQKNSRERMKRIEEGIKELGSQILKEHPVENTQLQNEKLYLYYLQNGRDMYVDQELDINRLSDYDVDHIVPQSFLKDDSIDNKVLTRSDKARGKSDNVPSEEVVKKMKNYWRQLLNAKLITQRKFDNLTKAERGGLSELDKAGFIKRQLVETRQITKHVAQILDSRMNTKYDENDKLIREVKVITLKSKLVSDFRKDFQFYKVREINNYHHAHDAYLNAVVGTALIKKYPKLESEFVYGDYKVYDVRKMIAKSEQEIGKATAKYFFYSNIMNFFKTEITLANGEIRKRPLIETNGETGEIVWDKGRDFATVRKVLSMPQVNIVKKTEVQTGGFSKESILPKRNSDKLIARKKDWDPKKYGGFDSPTVAYSVLVVAKVEKGKSKKLKSVKELLGITIMERSSFEKNPIDFLEAKGYKEVKKDLIIKLPKYSLFELENGRKRMLASAGELQKGNELALPSKYVNFLYLASHYEKLKGSPEDNEQKQLFVEQHKHYLDEIIEQISEFSKRVILADANLDKVLSAYNKHRDKPIREQAENIIHLFTLTNLGAPAAFKYFDTTIDRKRYTSTKEVLDATLIHQSITGLYETRIDLSQLGGDGGGGGGGSPAPGGTLNIEDEYRLHETSKEPDVSLGSTWLSDFPQAWAETGGMGLAVRQAPLIIPLKATSTPVSIKQYPMSQEARLGIKPHIQRLLDQGILVPCQSPWNTPLLPVKKPGTNDYRPVQDLREVNKRVEDIHPTVPNPYNLLSGLPPSHQWYTVLDLKDAFFCLRLHPTSQPLFAFEWRDPEMGISGQLTWTRLPQGFKNSPTLFNEALHRDLAGFRIQHPDLILLQYVDDLLLAATSELDCQQGTRALLQTLGDLGYRASAKKAQICQKQVKYLGYLLKEGQRWLTEARKETVMGQPIPKTPRQLREFLGTAGFCRLWIPGFAEMAAPLYPLTKPGTLFNWGPDQQKAFQEIKQALLTAPALGLPDLTKPFELFVDEKQGYAKGVLTQKLGPWRRPVAYLSKKLDPVAAGWPPCLRMVAAIAVLTKDAGKLTMGQPLVILAPHAVEALVKQPPDRWLSNARMTHYQALLLDTDRVQFGPVVALNPATLLPLPEEGLQHDCLDILAEAHGTRSDLMDQPLPDADHTWYTDGSSFLQEGQRKAGAAVTTETEVIWARALPAGTSAQRAELIALTQALKMAEGKKLNVYTDSRYAFATAHIHGEIYRRRGWLTSEGKEIKNKDEILALLKALFLPKRLSIIHCPGHQKGNSAEARGNRMADQAAREVATRETPETSTLLAGKRTADGSEFEKRTADGSEFESPKKKAKVE

SEQ ID NO: 7002 - protein, 2114 aa, synthetic construct
MPAAKRVKLDGGDKKYSIGLDIGTNSVGWAVITDEYKVPSKKFKVLGNTDRHSIKKNLIGALLFDSGETAEATRLKRTARRRYTRRKNRICYLQEIFSNEMAKVDDSFFHRLEESFLVEEDKKHERHPIFGNIVDEVAYHEKYPTIYHLRKKLVDSTDKADLRLIYLALAHMIKFRGHFLIEGDLNPDNSDVDKLFIQLVQTYNQLFEENPINASGVDAKAILSARLSKSRRLENLIAQLPGEKKNGLFGNLIALSLGLTPNFKSNFDLAEDAKLQLSKDTYDDDLDNLLAQIGDQYADLFLAAKNLSDAILLSDILRVNTEITKAPLSASMIKRYDEHHQDLTLLKALVRQQLPEKYKEIFFDQSKNGYAGYIDGGASQEEFYKFIKPILEKMDGTEELLVKLNREDLLRKQRTFDNGSIPHQIHLGELHAILRRQEDFYPFLKDNREKIEKILTFRIPYYVGPLARGNSRFAWMTRKSEETITPWNFEEVVDKGASAQSFIERMTNFDKNLPNEKVLPKHSLLYEYFTVYNELTKVKYVTEGMRKPAFLSGEQKKAIVDLLFKTNRKVTVKQLKEDYFKKIECFDSVEISGVEDRFNASLGTYHDLLKIIKDKDFLDNEENEDILEDIVLTLTLFEDREMIEERLKTYAHLFDDKVMKQLKRRRYTGWGRLSRKLINGIRDKQSGKTILDFLKSDGFANRNFMQLIHDDSLTFKEDIQKAQVSGQGDSLHEHIANLAGSPAIKKGILQTVKVVDELVKVMGRHKPENIVIEMARENQTTQKGQKNSRERMKRIEEGIKELGSQILKEHPVENTQLQNEKLYLYYLQNGRDMYVDQELDINRLSDYDVDHIVPQSFLKDDSIDNKVLTRSDKARGKSDNVPSEEVVKKMKNYWRQLLNAKLITQRKFDNLTKAERGGLSELDKAGFIKRQLVETRQITKHVAQILDSRMNTKYDENDKLIREVKVITLKSKLVSDFRKDFQFYKVREINNYHHAHDAYLNAVVGTALIKKYPKLESEFVYGDYKVYDVRKMIAKSEQEIGKATAKYFFYSNIMNFFKTEITLANGEIRKRPLIETNGETGEIVWDKGRDFATVRKVLSMPQVNIVKKTEVQTGGFSKESILPKRNSDKLIARKKDWDPKKYGGFDSPTVAYSVLVVAKVEKGKSKKLKSVKELLGITIMERSSFEKNPIDFLEAKGYKEVKKDLIIKLPKYSLFELENGRKRMLASAGELQKGNELALPSKYVNFLYLASHYEKLKGSPEDNEQKQLFVEQHKHYLDEIIEQISEFSKRVILADANLDKVLSAYNKHRDKPIREQAENIIHLFTLTNLGAPAAFKYFDTTIDRKRYTSTKEVLDATLIHQSITGLYETRIDLSQLGGDGGGGGGGSPAPGGVQEISDSRPMLHIYLNGRRFLGLLDTGADKTCIAGRDWPANWPIHQTESSLQGLGMACGVARSSQPLRWQHEDKSGIIHPFVIPTLPFTLWGRDIMKDIKVRLMTDSPDDSQDLMIGAIESNLFADQISWKSDQPVWLNQWPLKQEKLQALQQLVTEQLQLGHLEESNSPWNTPVFVIKKKSGKWRLLQDLRAVNATMHDMGALQPGLPSPVAVPKGWEIIIIDLQDCFFNIKLHPEDCKRFAFSVPSPNFKRPYQRFQWKVLPQGMKNSPTLCQKFVDKAILTVRDKYQDSYIVHYMDDILLAHPSRSIVDEILTSMIQALNKHGLVVSTEKIQKYDNLKYLGTHIQGDSVSYQKLQIRTDKLRTLNDFQKLLGNINWIRPFLKLTTGELKPLFEILNGDSNPISTRKLTPEACKALQLMNERLSTARVKRLDLSQPWSLCILKTEYTPTACLWQDGVVEWIHLPHISPKVITPYDIFCTQLIIKGRHRSKELFSKDPDYIVVPYTKVQFDLLLQEKEDWPISLLGFLGEVHFHLPKDPLLTFTLQTAIIFPHMTSTTPLEKGIVIFTDGSANGRSVTYIQGREPIIKENTQNTAQQAEIVAVITAFEEVSQPFNLYTDSKYVTGLFPEIETATLSPRTKIYTELKHLQRLIHKRQEKFYIGHIRGHTGLPGPLAQGNAYADSLTRILTAAGKRTADGSEFEKRTADGSEFESPKKKAKVE

SEQ ID NO: 7003 - protein, 2088 aa, synthetic construct
MPAAKRVKLDGGDKKYSIGLDIGTNSVGWAVITDEYKVPSKKFKVLGNTDRHSIKKNLIGALLFDSGETAEATRLKRTARRRYTRRKNRICYLQEIFSNEMAKVDDSFFHRLEESFLVEEDKKHERHPIFGNIVDEVAYHEKYPTIYHLRKKLVDSTDKADLRLIYLALAHMIKFRGHFLIEGDLNPDNSDVDKLFIQLVQTYNQLFEENPINASGVDAKAILSARLSKSRRLENLIAQLPGEKKNGLFGNLIALSLGLTPNFKSNFDLAEDAKLQLSKDTYDDDLDNLLAQIGDQYADLFLAAKNLSDAILLSDILRVNTEITKAPLSASMIKRYDEHHQDLTLLKALVRQQLPEKYKEIFFDQSKNGYAGYIDGGASQEEFYKFIKPILEKMDGTEELLVKLNREDLLRKQRTFDNGSIPHQIHLGELHAILRRQEDFYPFLKDNREKIEKILTFRIPYYVGPLARGNSRFAWMTRKSEETITPWNFEEVVDKGASAQSFIERMTNFDKNLPNEKVLPKHSLLYEYFTVYNELTKVKYVTEGMRKPAFLSGEQKKAIVDLLFKTNRKVTVKQLKEDYFKKIECFDSVEISGVEDRFNASLGTYHDLLKIIKDKDFLDNEENEDILEDIVLTLTLFEDREMIEERLKTYAHLFDDKVMKQLKRRRYTGWGRLSRKLINGIRDKQSGKTILDFLKSDGFANRNFMQLIHDDSLTFKEDIQKAQVSGQGDSLHEHIANLAGSPAIKKGILQTVKVVDELVKVMGRHKPENIVIEMARENQTTQKGQKNSRERMKRIEEGIKELGSQILKEHPVENTQLQNEKLYLYYLQNGRDMYVDQELDINRLSDYDVDHIVPQSFLKDDSIDNKVLTRSDKARGKSDNVPSEEVVKKMKNYWRQLLNAKLITQRKFDNLTKAERGGLSELDKAGFIKRQLVETRQITKHVAQILDSRMNTKYDENDKLIREVKVITLKSKLVSDFRKDFQFYKVREINNYHHAHDAYLNAVVGTALIKKYPKLESEFVYGDYKVYDVRKMIAKSEQEIGKATAKYFFYSNIMNFFKTEITLANGEIRKRPLIETNGETGEIVWDKGRDFATVRKVLSMPQVNIVKKTEVQTGGFSKESILPKRNSDKLIARKKDWDPKKYGGFDSPTVAYSVLVVAKVEKGKSKKLKSVKELLGITIMERSSFEKNPIDFLEAKGYKEVKKDLIIKLPKYSLFELENGRKRMLASAGELQKGNELALPSKYVNFLYLASHYEKLKGSPEDNEQKQLFVEQHKHYLDEIIEQISEFSKRVILADANLDKVLSAYNKHRDKPIREQAENIIHLFTLTNLGAPAAFKYFDTTIDRKRYTSTKEVLDATLIHQSITGLYETRIDLSQLGGDGGGGGGGSPAPGGTLQLDDEYRLYSPLVKPDQNIQFWLEQFPQAWAETAGMGLAKQVPPQVIQLKASATPVSVRQYPLSKEAQEGIRPHVQRLIQQGILVPVQSPWNTPLLPVRKPGTNDYRPVQDLREVNKRVQDIHPTVPNPYNLLCALPPQRSWYTVLDLKDAFFCLRLHPTSQPLFAFEWRDPGTGRTGQLTWTRLPQGFKNSPTIFDEALHRDLANFRIQHPQVTLLQYVDDLLLAGATKQDCLEGTKALLLELSDLGYRASAKKAQICRREVTYLGYSLRDGQRWLTEARKKTVVQIPAPTTAKQVREFLGTAGFCRLWIPGFATLAAPLYPLTKEKGEFSWAPEHQKAFDAIKKALLSAPALALPDVTKPFTLYVDERKGVARGVLTQTLGPWRRPVAYLSKKLDPVASGWPVCLKAIAAVAILVKDADKLTLGQNITVIAPHALENIVRQPPDRWMTNARMTHYQSLLLTERVTFAPPAALNPATLLPEETDEPVTHDCHQLLIEETGVRKDLTDIPLTGEVLTWFTDGSSYVVEGKRMAGAAVVDGTRTIWASSLPEGTSAQKAELMALTQALRLAEGKSINIYTDSRYAFATAHVHGAIYKQRGLLTSAGREIKNKEEILSLLEALHLPKRLAIIHCPGHQKAKDPISRGNQMADRVAKQAAQGVNLLAGKRTADGSEFEKRTADGSEFESPKKKAKVE

SEQ ID NO: 7004 - protein, 2174 aa, synthetic construct
MPAAKRVKLDGGDKKYSIGLDIGTNSVGWAVITDEYKVPSKKFKVLGNTDRHSIKKNLIGALLFDSGETAEATRLKRTARRRYTRRKNRICYLQEIFSNEMAKVDDSFFHRLEESFLVEEDKKHERHPIFGNIVDEVAYHEKYPTIYHLRKKLVDSTDKADLRLIYLALAHMIKFRGHFLIEGDLNPDNSDVDKLFIQLVQTYNQLFEENPINASGVDAKAILSARLSKSRRLENLIAQLPGEKKNGLFGNLIALSLGLTPNFKSNFDLAEDAKLQLSKDTYDDDLDNLLAQIGDQYADLFLAAKNLSDAILLSDILRVNTEITKAPLSASMIKRYDEHHQDLTLLKALVRQQLPEKYKEIFFDQSKNGYAGYIDGGASQEEFYKFIKPILEKMDGTEELLVKLNREDLLRKQRTFDNGSIPHQIHLGELHAILRRQEDFYPFLKDNREKIEKILTFRIPYYVGPLARGNSRFAWMTRKSEETITPWNFEEVVDKGASAQSFIERMTNFDKNLPNEKVLPKHSLLYEYFTVYNELTKVKYVTEGMRKPAFLSGEQKKAIVDLLFKTNRKVTVKQLKEDYFKKIECFDSVEISGVEDRFNASLGTYHDLLKIIKDKDFLDNEENEDILEDIVLTLTLFEDREMIEERLKTYAHLFDDKVMKQLKRRRYTGWGRLSRKLINGIRDKQSGKTILDFLKSDGFANRNFMQLIHDDSLTFKEDIQKAQVSGQGDSLHEHIANLAGSPAIKKGILQTVKVVDELVKVMGRHKPENIVIEMARENQTTQKGQKNSRERMKRIEEGIKELGSQILKEHPVENTQLQNEKLYLYYLQNGRDMYVDQELDINRLSDYDVDHIVPQSFLKDDSIDNKVLTRSDKARGKSDNVPSEEVVKKMKNYWRQLLNAKLITQRKFDNLTKAERGGLSELDKAGFIKRQLVETRQITKHVAQILDSRMNTKYDENDKLIREVKVITLKSKLVSDFRKDFQFYKVREINNYHHAHDAYLNAVVGTALIKKYPKLESEFVYGDYKVYDVRKMIAKSEQEIGKATAKYFFYSNIMNFFKTEITLANGEIRKRPLIETNGETGEIVWDKGRDFATVRKVLSMPQVNIVKKTEVQTGGFSKESILPKRNSDKLIARKKDWDPKKYGGFDSPTVAYSVLVVAKVEKGKSKKLKSVKELLGITIMERSSFEKNPIDFLEAKGYKEVKKDLIIKLPKYSLFELENGRKRMLASAGELQKGNELALPSKYVNFLYLASHYEKLKGSPEDNEQKQLFVEQHKHYLDEIIEQISEFSKRVILADANLDKVLSAYNKHRDKPIREQAENIIHLFTLTNLGAPAAFKYFDTTIDRKRYTSTKEVLDATLIHQSITGLYETRIDLSQLGGDGGGGGGGSPAPGGMDPLQLLQPLEAEIKGTKLKAHWNSGATITCVPEAFLEDERPIQTMLIKTIHGEKQQDVYYLTFKVQGRKVEAEVLASPYDYILLNPSDVPWLMKKPLQLTVLVPLHEYQERLLQQTALPKEQKELLQKLFLKYDALWQHWENQVGHRRIKPHNIATGTLAPRPQKQYPINPKAKPSIQIVIDDLLKQGVLIQQNSTMNTPVYPVPKPDGKWRMVLDYREVNKTIPLIAAQNQHSAGILSSIYRGKYKTTLDLTNGFWAHPITPESYWLTAFTWQGKQYCWTRLPQGFLNSPALFNADVVDLLKEIPNVQAYVDDIYISHDDPQEHLEQLEKIFSILLNAGYVVSLKKSEIAQREVEFLGFNITKEGRGLTDTFKQKLLNITPPKDLKQLQSILGLLNFARNFIPNYSELVKPLYTIVAPANGKFISWTEDNSNQLQHIISVLNQADNLEERNPETRLIIKVNSSPSAGYIRYYNEGSKRPIMYVNYIFSKAEAKFTQTEKLLTTMHKGLIKAMDLAMGQEILVYSPIVSMTKIQRTPLPERKALPVRWITWMTYLEDPRIQFHYDKSLPELQQIPNVTEDVIAKTKHPSEFAMVFYTDGSAIKHPDVNKSHSAGMGIAQVQFIPEYKIVHQWSIPLGDHTAQLAEIAAVEFACKKALKISGPVLIVTDSFYVAESANKELPYWKSNGFLNNKKKPLRHVSKWKSIAECLQLKPDIIIMHEKGHQQPMTTLHTEGNNLADKLATQGSYVVHAGKRTADGSEFEKRTADGSEFESPKKKAKVE

SEQ ID NO: 7005 - protein, 2085 aa, synthetic construct
MPAAKRVKLDGGDKKYSIGLDIGTNSVGWAVITDEYKVPSKKFKVLGNTDRHSIKKNLIGALLFDSGETAEATRLKRTARRRYTRRKNRICYLQEIFSNEMAKVDDSFFHRLEESFLVEEDKKHERHPIFGNIVDEVAYHEKYPTIYHLRKKLVDSTDKADLRLIYLALAHMIKFRGHFLIEGDLNPDNSDVDKLFIQLVQTYNQLFEENPINASGVDAKAILSARLSKSRRLENLIAQLPGEKKNGLFGNLIALSLGLTPNFKSNFDLAEDAKLQLSKDTYDDDLDNLLAQIGDQYADLFLAAKNLSDAILLSDILRVNTEITKAPLSASMIKRYDEHHQDLTLLKALVRQQLPEKYKEIFFDQSKNGYAGYIDGGASQEEFYKFIKPILEKMDGTEELLVKLNREDLLRKQRTFDNGSIPHQIHLGELHAILRRQEDFYPFLKDNREKIEKILTFRIPYYVGPLARGNSRFAWMTRKSEETITPWNFEEVVDKGASAQSFIERMTNFDKNLPNEKVLPKHSLLYEYFTVYNELTKVKYVTEGMRKPAFLSGEQKKAIVDLLFKTNRKVTVKQLKEDYFKKIECFDSVEISGVEDRFNASLGTYHDLLKIIKDKDFLDNEENEDILEDIVLTLTLFEDREMIEERLKTYAHLFDDKVMKQLKRRRYTGWGRLSRKLINGIRDKQSGKTILDFLKSDGFANRNFMQLIHDDSLTFKEDIQKAQVSGQGDSLHEHIANLAGSPAIKKGILQTVKVVDELVKVMGRHKPENIVIEMARENQTTQKGQKNSRERMKRIEEGIKELGSQILKEHPVENTQLQNEKLYLYYLQNGRDMYVDQELDINRLSDYDVDHIVPQSFLKDDSIDNKVLTRSDKARGKSDNVPSEEVVKKMKNYWRQLLNAKLITQRKFDNLTKAERGGLSELDKAGFIKRQLVETRQITKHVAQILDSRMNTKYDENDKLIREVKVITLKSKLVSDFRKDFQFYKVREINNYHHAHDAYLNAVVGTALIKKYPKLESEFVYGDYKVYDVRKMIAKSEQEIGKATAKYFFYSNIMNFFKTEITLANGEIRKRPLIETNGETGEIVWDKGRDFATVRKVLSMPQVNIVKKTEVQTGGFSKESILPKRNSDKLIARKKDWDPKKYGGFDSPTVAYSVLVVAKVEKGKSKKLKSVKELLGITIMERSSFEKNPIDFLEAKGYKEVKKDLIIKLPKYSLFELENGRKRMLASAGELQKGNELALPSKYVNFLYLASHYEKLKGSPEDNEQKQLFVEQHKHYLDEIIEQISEFSKRVILADANLDKVLSAYNKHRDKPIREQAENIIHLFTLTNLGAPAAFKYFDTTIDRKRYTSTKEVLDATLIHQSITGLYETRIDLSQLGGDGGGGGGGSPAPGGIPWLMKKPLQLTTLVPLQEYEERLLKQTMLTGSYKEKLQSLFLKYDALWQHWENQVGHRRIKPHHIATGTVNPRPQKQYPINPKAKASIQTVINDLLKQGVLIQQNSIMNTPVYPVPKPDGKWRMVLDYREVNKTIPLIAAQNQHSAGILSSIFRGKYKTTLDLSNGFWAHSITPESYWLTAFTWLGQQYCWTRLPQGFLNSPALFNADVVDLLKEVPNVQVYVDDIYISHDDPREHLEQLEKVFSLLLNAGYVVSLKKSEIAQHEVEFLGFNITKEGRGLTETFKQKLLNITPPRDLKQLQSILGLLNFARNFIPNFSELVKPLYNIIATAPGKYITWTTDNSQQLQNIISMLNSAENLEERNPEVRLIMKVNTSPSAGYIRFYNEFAKRPIMYLNYVYTKAEVKFTNTEKLLTTIHKGLIKALDLGMGQEILVYSPIVSMTKIQKTPLPERKALPIRWITWMSYLEDPRIQFHYDKTLPELQQVPTVTDDIIAKIKHPSEFSMVFYTDGSAIKHPNVNKSHNAGMGIAQVQFKPEFTVINTWSIPLGDHTAQLAEVAAVEFACKKALKIDGPVLIVTDSFYVAESVNKELPYWQSNGFFNNKKKPLKHVSKWKSIADCIQLKPDIIIIHEKGHQPTASTFHTEGNNLADKLATQGSYVVNAGKRTADGSEFEKRTADGSEFESPKKKAKVE

SEQ ID NO: 7006 - protein, 2085 aa, synthetic construct
MPAAKRVKLDGGDKKYSIGLDIGTNSVGWAVITDEYKVPSKKFKVLGNTDRHSIKKNLIGALLFDSGETAEATRLKRTARRRYTRRKNRICYLQEIFSNEMAKVDDSFFHRLEESFLVEEDKKHERHPIFGNIVDEVAYHEKYPTIYHLRKKLVDSTDKADLRLIYLALAHMIKFRGHFLIEGDLNPDNSDVDKLFIQLVQTYNQLFEENPINASGVDAKAILSARLSKSRRLENLIAQLPGEKKNGLFGNLIALSLGLTPNFKSNFDLAEDAKLQLSKDTYDDDLDNLLAQIGDQYADLFLAAKNLSDAILLSDILRVNTEITKAPLSASMIKRYDEHHQDLTLLKALVRQQLPEKYKEIFFDQSKNGYAGYIDGGASQEEFYKFIKPILEKMDGTEELLVKLNREDLLRKQRTFDNGSIPHQIHLGELHAILRRQEDFYPFLKDNREKIEKILTFRIPYYVGPLARGNSRFAWMTRKSEETITPWNFEEVVDKGASAQSFIERMTNFDKNLPNEKVLPKHSLLYEYFTVYNELTKVKYVTEGMRKPAFLSGEQKKAIVDLLFKTNRKVTVKQLKEDYFKKIECFDSVEISGVEDRFNASLGTYHDLLKIIKDKDFLDNEENEDILEDIVLTLTLFEDREMIEERLKTYAHLFDDKVMKQLKRRRYTGWGRLSRKLINGIRDKQSGKTILDFLKSDGFANRNFMQLIHDDSLTFKEDIQKAQVSGQGDSLHEHIANLAGSPAIKKGILQTVKVVDELVKVMGRHKPENIVIEMARENQTTQKGQKNSRERMKRIEEGIKELGSQILKEHPVENTQLQNEKLYLYYLQNGRDMYVDQELDINRLSDYDVDHIVPQSFLKDDSIDNKVLTRSDKARGKSDNVPSEEVVKKMKNYWRQLLNAKLITQRKFDNLTKAERGGLSELDKAGFIKRQLVETRQITKHVAQILDSRMNTKYDENDKLIREVKVITLKSKLVSDFRKDFQFYKVREINNYHHAHDAYLNAVVGTALIKKYPKLESEFVYGDYKVYDVRKMIAKSEQEIGKATAKYFFYSNIMNFFKTEITLANGEIRKRPLIETNGETGEIVWDKGRDFATVRKVLSMPQVNIVKKTEVQTGGFSKESILPKRNSDKLIARKKDWDPKKYGGFDSPTVAYSVLVVAKVEKGKSKKLKSVKELLGITIMERSSFEKNPIDFLEAKGYKEVKKDLIIKLPKYSLFELENGRKRMLASAGELQKGNELALPSKYVNFLYLASHYEKLKGSPEDNEQKQLFVEQHKHYLDEIIEQISEFSKRVILADANLDKVLSAYNKHRDKPIREQAENIIHLFTLTNLGAPAAFKYFDTTIDRKRYTSTKEVLDATLIHQSITGLYETRIDLSQLGGDGGGGGGGSPAPGGIPWLMKKPLQLTTLVPLQEYEERLLKQTMLTGSYKEKLQSLFLKYDALWQHWENQVGHRRIKPHHIATGTVNPRPQKQYPINPKAKASIQTVINDLLKQGVLIQQNSIMNTPVYPVPKPDGKWRMVLDYREVNKTIPLIAAQNQHSAGILSSIFRGKYKTTLDLSNGFWAHSITPESYWLTAFTWLGQQYCWTRLPQGFLNSPALFNADVVDLLKEVPNVQVYVDDIYISHDDPREHLEQLEKVFSLLLNAGYVVSLKKSEIAQHEVEFLGFNITKEGRGLTETFKQKLLNITPPRDLKQLQSILGKLNFARNFIPNFSELVKPLYNIIATAPGKYITWTTDNSQQLQNIISMLNSAENLEERNPEVRLIMKVNTSPSAGYIRFYNEFAKRPIMYLNYVYTKAEVKFTNTEKLLTTIHKGLIKALDLGMGQEILVYSPIVSMTKIQKTPLPERKALPIRWITWMSYLEDPRIQFHYDKTLPELQQVPTVTDDIIAKIKHPSEFSMVFYTDGSAIKHPNVNKSHNAGMGIAQVQFKPEFTVINTWSIPLGDHTAQLAEVAAVEFACKKALKIDGPVLIVTDSFYVAESVNKELPYWQSNGFFNNKKKPLKHVSKWKSIADCIQLKPDIIIIHEKGHQPTASTFHTEGNNLADKLATQGSYVVNAGKRTADGSEFEKRTADGSEFESPKKKAKVE

SEQ ID NO: 7007 - protein, 2174 aa, synthetic construct
MPAAKRVKLDGGDKKYSIGLDIGTNSVGWAVITDEYKVPSKKFKVLGNTDRHSIKKNLIGALLFDSGETAEATRLKRTARRRYTRRKNRICYLQEIFSNEMAKVDDSFFHRLEESFLVEEDKKHERHPIFGNIVDEVAYHEKYPTIYHLRKKLVDSTDKADLRLIYLALAHMIKFRGHFLIEGDLNPDNSDVDKLFIQLVQTYNQLFEENPINASGVDAKAILSARLSKSRRLENLIAQLPGEKKNGLFGNLIALSLGLTPNFKSNFDLAEDAKLQLSKDTYDDDLDNLLAQIGDQYADLFLAAKNLSDAILLSDILRVNTEITKAPLSASMIKRYDEHHQDLTLLKALVRQQLPEKYKEIFFDQSKNGYAGYIDGGASQEEFYKFIKPILEKMDGTEELLVKLNREDLLRKQRTFDNGSIPHQIHLGELHAILRRQEDFYPFLKDNREKIEKILTFRIPYYVGPLARGNSRFAWMTRKSEETITPWNFEEVVDKGASAQSFIERMTNFDKNLPNEKVLPKHSLLYEYFTVYNELTKVKYVTEGMRKPAFLSGEQKKAIVDLLFKTNRKVTVKQLKEDYFKKIECFDSVEISGVEDRFNASLGTYHDLLKIIKDKDFLDNEENEDILEDIVLTLTLFEDREMIEERLKTYAHLFDDKVMKQLKRRRYTGWGRLSRKLINGIRDKQSGKTILDFLKSDGFANRNFMQLIHDDSLTFKEDIQKAQVSGQGDSLHEHIANLAGSPAIKKGILQTVKVVDELVKVMGRHKPENIVIEMARENQTTQKGQKNSRERMKRIEEGIKELGSQILKEHPVENTQLQNEKLYLYYLQNGRDMYVDQELDINRLSDYDVDHIVPQSFLKDDSIDNKVLTRSDKARGKSDNVPSEEVVKKMKNYWRQLLNAKLITQRKFDNLTKAERGGLSELDKAGFIKRQLVETRQITKHVAQILDSRMNTKYDENDKLIREVKVITLKSKLVSDFRKDFQFYKVREINNYHHAHDAYLNAVVGTALIKKYPKLESEFVYGDYKVYDVRKMIAKSEQEIGKATAKYFFYSNIMNFFKTEITLANGEIRKRPLIETNGETGEIVWDKGRDFATVRKVLSMPQVNIVKKTEVQTGGFSKESILPKRNSDKLIARKKDWDPKKYGGFDSPTVAYSVLVVAKVEKGKSKKLKSVKELLGITIMERSSFEKNPIDFLEAKGYKEVKKDLIIKLPKYSLFELENGRKRMLASAGELQKGNELALPSKYVNFLYLASHYEKLKGSPEDNEQKQLFVEQHKHYLDEIIEQISEFSKRVILADANLDKVLSAYNKHRDKPIREQAENIIHLFTLTNLGAPAAFKYFDTTIDRKRYTSTKEVLDATLIHQSITGLYETRIDLSQLGGDGGGGGGGSPAPGGMDPLQLLQPLEAEIKGTKLKAHWNSGATITCVPQAFLEEEVPIKNIWIKTIHGEKEQPVYYLTFKIQGRKVEAEVISSPYDYILVSPSDIPWLMKKPLQLTTLVPLQEYEERLLKQTMLTGSYKEKLQSLFLKYDALWQHWENQVGHRRIKPHHIATGTVNPRPQKQYPINPKAKASIQTVINDLLKQGVLIQQNSIMNTPVYPVPKPDGKWRMVLDYREVNKTIPLIAAQNQHSAGILSSIFRGKYKTTLDLSNGFWAHSITPESYWLTAFTWLGQQYCWTRLPQGFLNSPALFNADVVDLLKEVPNVQVYVDDIYISHDDPREHLEQLEKVFSLLLNAGYVVSLKKSEIAQHEVEFLGFNITKEGRGLTETFKQKLLNITPPRDLKQLQSILGKLNFARNFIPNFSELVKPLYNIIATAPGKYITWTTDNSQQLQNIISMLNSAENLEERNPEVRLIMKVNTSPSAGYIRFYNEFAKRPIMYLNYVYTKAEVKFTNTEKLLTTIHKGLIKALDLGMGQEILVYSPIVSMTKIQKTPLPERKALPIRWITWMSYLEDPRIQFHYDKTLPELQQVPTVTDDIIAKIKHPSEFSMVFYTDGSAIKHPNVNKSHNAGMGIAQVQFKPEFTVINTWSIPLGDHTAQLAEVAAVEFACKKALKIDGPVLIVTDSFYVAESVNKELPYWQSNGFFNNKKKPLKHVSKWKSIADCIQLKPDIIIIHEKGHQPTASTFHTEGNNLADKLATQGSYVVNAGKRTADGSEFEKRTADGSEFESPKKKAKVE

SEQ ID NO: 7008 - protein, 2092 aa, synthetic construct
MPAAKRVKLDGGDKKYSIGLDIGTNSVGWAVITDEYKVPSKKFKVLGNTDRHSIKKNLIGALLFDSGETAEATRLKRTARRRYTRRKNRICYLQEIFSNEMAKVDDSFFHRLEESFLVEEDKKHERHPIFGNIVDEVAYHEKYPTIYHLRKKLVDSTDKADLRLIYLALAHMIKFRGHFLIEGDLNPDNSDVDKLFIQLVQTYNQLFEENPINASGVDAKAILSARLSKSRRLENLIAQLPGEKKNGLFGNLIALSLGLTPNFKSNFDLAEDAKLQLSKDTYDDDLDNLLAQIGDQYADLFLAAKNLSDAILLSDILRVNTEITKAPLSASMIKRYDEHHQDLTLLKALVRQQLPEKYKEIFFDQSKNGYAGYIDGGASQEEFYKFIKPILEKMDGTEELLVKLNREDLLRKQRTFDNGSIPHQIHLGELHAILRRQEDFYPFLKDNREKIEKILTFRIPYYVGPLARGNSRFAWMTRKSEETITPWNFEEVVDKGASAQSFIERMTNFDKNLPNEKVLPKHSLLYEYFTVYNELTKVKYVTEGMRKPAFLSGEQKKAIVDLLFKTNRKVTVKQLKEDYFKKIECFDSVEISGVEDRFNASLGTYHDLLKIIKDKDFLDNEENEDILEDIVLTLTLFEDREMIEERLKTYAHLFDDKVMKQLKRRRYTGWGRLSRKLINGIRDKQSGKTILDFLKSDGFANRNFMQLIHDDSLTFKEDIQKAQVSGQGDSLHEHIANLAGSPAIKKGILQTVKVVDELVKVMGRHKPENIVIEMARENQTTQKGQKNSRERMKRIEEGIKELGSQILKEHPVENTQLQNEKLYLYYLQNGRDMYVDQELDINRLSDYDVDHIVPQSFLKDDSIDNKVLTRSDKARGKSDNVPSEEVVKKMKNYWRQLLNAKLITQRKFDNLTKAERGGLSELDKAGFIKRQLVETRQITKHVAQILDSRMNTKYDENDKLIREVKVITLKSKLVSDFRKDFQFYKVREINNYHHAHDAYLNAVVGTALIKKYPKLESEFVYGDYKVYDVRKMIAKSEQEIGKATAKYFFYSNIMNFFKTEITLANGEIRKRPLIETNGETGEIVWDKGRDFATVRKVLSMPQVNIVKKTEVQTGGFSKESILPKRNSDKLIARKKDWDPKKYGGFDSPTVAYSVLVVAKVEKGKSKKLKSVKELLGITIMERSSFEKNPIDFLEAKGYKEVKKDLIIKLPKYSLFELENGRKRMLASAGELQKGNELALPSKYVNFLYLASHYEKLKGSPEDNEQKQLFVEQHKHYLDEIIEQISEFSKRVILADANLDKVLSAYNKHRDKPIREQAENIIHLFTLTNLGAPAAFKYFDTTIDRKRYTSTKEVLDATLIHQSITGLYETRIDLSQLGGDGGGGGGGSPAPGGVLNLEEEYRLHEKPVPSSIDPSWLQLFPTVWAERAGMGLANQVPPVVVELRSGASPVAVRQYPMSKEAREGIRPHIQRFLDLGVLVPCQSPWNTPLLPVKKPGTNDYRPVQDLREINKRVQDIHPTVPNPYNLLSSLPPSHTWYSVLDLKDAFFCLKLHPNSQPLFAFEWRDPEKGNTGQLTWTRLPQGFKNSPTLFNEALHRDLAPFRALNPQVVLLQYVDDLLVAAPTYRDCKEGTQKLLQELSKLGYRVSAKKAQLCQKEVTYLGYLLKEGKRWLTPARKATVMKIPPPTTPRQVREFLGKAGFCRLFIPGFASLAAPLYPLTKPSIPFIWTEEHQKAFDRIKEALLSAPALALPDLTKPFTLYVDERAGVARGVLTQTLGPWRRPVAYLSKKLDPVASGWPTCLKAVAAVALLLKDADKLTLGQNVTVIASHSLESIVRQPPDRWMTNARMTHYQSLLLNERVSFAPPAVLNPATLLPVESEATPVHRCSEILAEETGTRRDLKDQPLPGVPAWYTDGSSFIAEGKRRAGAAIVDGKRTVWASSLPEGTSAQKAELVALTQALRLAEGKDINIYTDSRYAFATAHIHGAIYKQRGWLTSAGKDIKNKEEILALLEAIHLPKRVAIIHCPGHQKGNDPVATGNRRADEAAKQAALSTRVLAETTKPAGKRTADGSEFEKRTADGSEFESPKKKAKVE

SEQ ID NO: 7009 - protein, 2096 aa, synthetic construct
MPAAKRVKLDGGDKKYSIGLDIGTNSVGWAVITDEYKVPSKKFKVLGNTDRHSIKKNLIGALLFDSGETAEATRLKRTARRRYTRRKNRICYLQEIFSNEMAKVDDSFFHRLEESFLVEEDKKHERHPIFGNIVDEVAYHEKYPTIYHLRKKLVDSTDKADLRLIYLALAHMIKFRGHFLIEGDLNPDNSDVDKLFIQLVQTYNQLFEENPINASGVDAKAILSARLSKSRRLENLIAQLPGEKKNGLFGNLIALSLGLTPNFKSNFDLAEDAKLQLSKDTYDDDLDNLLAQIGDQYADLFLAAKNLSDAILLSDILRVNTEITKAPLSASMIKRYDEHHQDLTLLKALVRQQLPEKYKEIFFDQSKNGYAGYIDGGASQEEFYKFIKPILEKMDGTEELLVKLNREDLLRKQRTFDNGSIPHQIHLGELHAILRRQEDFYPFLKDNREKIEKILTFRIPYYVGPLARGNSRFAWMTRKSEETITPWNFEEVVDKGASAQSFIERMTNFDKNLPNEKVLPKHSLLYEYFTVYNELTKVKYVTEGMRKPAFLSGEQKKAIVDLLFKTNRKVTVKQLKEDYFKKIECFDSVEISGVEDRFNASLGTYHDLLKIIKDKDFLDNEENEDILEDIVLTLTLFEDREMIEERLKTYAHLFDDKVMKQLKRRRYTGWGRLSRKLINGIRDKQSGKTILDFLKSDGFANRNFMQLIHDDSLTFKEDIQKAQVSGQGDSLHEHIANLAGSPAIKKGILQTVKVVDELVKVMGRHKPENIVIEMARENQTTQKGQKNSRERMKRIEEGIKELGSQILKEHPVENTQLQNEKLYLYYLQNGRDMYVDQELDINRLSDYDVDHIVPQSFLKDDSIDNKVLTRSDKARGKSDNVPSEEVVKKMKNYWRQLLNAKLITQRKFDNLTKAERGGLSELDKAGFIKRQLVETRQITKHVAQILDSRMNTKYDENDKLIREVKVITLKSKLVSDFRKDFQFYKVREINNYHHAHDAYLNAVVGTALIKKYPKLESEFVYGDYKVYDVRKMIAKSEQEIGKATAKYFFYSNIMNFFKTEITLANGEIRKRPLIETNGETGEIVWDKGRDFATVRKVLSMPQVNIVKKTEVQTGGFSKESILPKRNSDKLIARKKDWDPKKYGGFDSPTVAYSVLVVAKVEKGKSKKLKSVKELLGITIMERSSFEKNPIDFLEAKGYKEVKKDLIIKLPKYSLFELENGRKRMLASAGELQKGNELALPSKYVNFLYLASHYEKLKGSPEDNEQKQLFVEQHKHYLDEIIEQISEFSKRVILADANLDKVLSAYNKHRDKPIREQAENIIHLFTLTNLGAPAAFKYFDTTIDRKRYTSTKEVLDATLIHQSITGLYETRIDLSQLGGDGGGGGPAPGGSGGTAPLEEEYRLFLEAPIQNVTLLEQWKREIPKVWAEINPPGLASTQAPIHVQLLSTALPVRVRQYPITLEAKRSLRETIRKFRAAGILRPVHSPWNTPLLPVRKSGTSEYRMVQDLREVNKRVETIHPTVPNPYTLLSLLPPDRIWYSVLDLKDAFFCIPLAPESQLIFAFEWADAEEGESGQLTWTRLPQGFKNSPTLFNEALNRDLQGFRLDHPSVSLLQYVDDLLIAADTQAACLSATRDLLMTLAELGYRVSGKKAQLCQEEVTYLGFKIHKGSRSLSNSRTQAILQIPVPKTKRQVREFLGTIGYCRLWIPGFAELAQPLYAATRPGNDPLVWGEKEEEAFQSLKLALTQPPALALPSLDKPFQLFVEETSGAAKGVLTQALGPWKRPVAYLSKRLDPVAAGWPRCLRAIAAAALLTREASKLTFGQDIEITSSHNLESLLRSPPDKWLTNARITQYQVLLLDPPRVRFKQTAALNPATLLPETDDTLPIHHCLDTLDSLTSTRPDLTDQPLAQAEATLFTDGSSYIRDGKRYAGAAVVTLDSVIWAEPLPIGTSAQKAELIALTKALEWSKDKSVNIYTDSRYAFATLHVHGMIYRERGWLTAGGKAIKNAPEILALLTAVWLPKRVAVMHCKGHQKDDAPTSTGNRRADEVAREVAIRPLSTQATISAGKRTADGSEFEKRTADGSEFESPKKKAKVE

SEQ ID NO: 7010 - protein, 2216 aa, synthetic construct
MPAAKRVKLDGGDKKYSIGLDIGTNSVGWAVITDEYKVPSKKFKVLGNTDRHSIKKNLIGALLFDSGETAEATRLKRTARRRYTRRKNRICYLQEIFSNEMAKVDDSFFHRLEESFLVEEDKKHERHPIFGNIVDEVAYHEKYPTIYHLRKKLVDSTDKADLRLIYLALAHMIKFRGHFLIEGDLNPDNSDVDKLFIQLVQTYNQLFEENPINASGVDAKAILSARLSKSRRLENLIAQLPGEKKNGLFGNLIALSLGLTPNFKSNFDLAEDAKLQLSKDTYDDDLDNLLAQIGDQYADLFLAAKNLSDAILLSDILRVNTEITKAPLSASMIKRYDEHHQDLTLLKALVRQQLPEKYKEIFFDQSKNGYAGYIDGGASQEEFYKFIKPILEKMDGTEELLVKLNREDLLRKQRTFDNGSIPHQIHLGELHAILRRQEDFYPFLKDNREKIEKILTFRIPYYVGPLARGNSRFAWMTRKSEETITPWNFEEVVDKGASAQSFIERMTNFDKNLPNEKVLPKHSLLYEYFTVYNELTKVKYVTEGMRKPAFLSGEQKKAIVDLLFKTNRKVTVKQLKEDYFKKIECFDSVEISGVEDRFNASLGTYHDLLKIIKDKDFLDNEENEDILEDIVLTLTLFEDREMIEERLKTYAHLFDDKVMKQLKRRRYTGWGRLSRKLINGIRDKQSGKTILDFLKSDGFANRNFMQLIHDDSLTFKEDIQKAQVSGQGDSLHEHIANLAGSPAIKKGILQTVKVVDELVKVMGRHKPENIVIEMARENQTTQKGQKNSRERMKRIEEGIKELGSQILKEHPVENTQLQNEKLYLYYLQNGRDMYVDQELDINRLSDYDVDHIVPQSFLKDDSIDNKVLTRSDKARGKSDNVPSEEVVKKMKNYWRQLLNAKLITQRKFDNLTKAERGGLSELDKAGFIKRQLVETRQITKHVAQILDSRMNTKYDENDKLIREVKVITLKSKLVSDFRKDFQFYKVREINNYHHAHDAYLNAVVGTALIKKYPKLESEFVYGDYKVYDVRKMIAKSEQEIGKATAKYFFYSNIMNFFKTEITLANGEIRKRPLIETNGETGEIVWDKGRDFATVRKVLSMPQVNIVKKTEVQTGGFSKESILPKRNSDKLIARKKDWDPKKYGGFDSPTVAYSVLVVAKVEKGKSKKLKSVKELLGITIMERSSFEKNPIDFLEAKGYKEVKKDLIIKLPKYSLFELENGRKRMLASAGELQKGNELALPSKYVNFLYLASHYEKLKGSPEDNEQKQLFVEQHKHYLDEIIEQISEFSKRVILADANLDKVLSAYNKHRDKPIREQAENIIHLFTLTNLGAPAAFKYFDTTIDRKRYTSTKEVLDATLIHQSITGLYETRIDLSQLGGDGGGGGPAPGGSGGTLGDQGSRGSDPLPEPRVTLTVEGIPTEFLVNTGAEHSVLTKPMGKMGSKRTVVAGATGSKVYPWTTKRLLKIGQKQVTHSFLVIPECPAPLLGRDLLTKLKAQIQFSTEGPQVTWEDRPAMCLVLNLEEEYRLHEKPVPPSIDPSWLQLFPMVWAEKAGMGLANQVPPVVVELKSDASPVAVRQYPMSKEAREGIRPHIQRFLDLGILVPCQSPWNTPLLPVKKPGTNDYRPVQDLREVNKRVQDIHPTVPNPYNLLSSLPPSHTWYSVLDLKDAFFCLKLHPNSQPLFAFEWRDPEKGNTGQLTWTRLPQGFKNSPTLFDEALHRDLASFRALNPQVVMLQYVDDLLVAAPTYRDCKEGTRRLLQELSKLGYRVSAKKAQLCREEVTYLGYLLKGGKRWLTPARKATVMKIPTPTTPRQVREFLGTAGFCRLWIPGFASLAAPLYPLTREKVPFTWTEAHQEAFGRIKEALLSAPALALPDLTKPFALYVDEKEGVARGVLTQTLGPWRRPVAYLSKKLDPVASGWPTCLKAIAAVALLLKDADKLTLGQNVLVIAPHNLESIVRQPPDRWMTNARMTHYQSLLLNERVSFAPPAILNPATLLPVESDDTPIHICSEILAEETGTRPDLRDQPLPGVPAWYTDGSSFIMDGRRQAGAAIVDNKRTVWASNLPEGTSAQKAELIALTQALRLAEGKSINIYTDSRYAFATAHVHGAIYKQRGLLTSAGKDIKNKEEILALLEAIHLPKRVAIIHCPGHQRGTDPVATGNRKADEAAKQAAQSTRILTETTKNAGKRTADGSEFEKRTADGSEFESPKKKAKVE

SEQ ID NO: 7011 - protein, 2125 aa, synthetic construct
MPAAKRVKLDGGDKKYSIGLDIGTNSVGWAVITDEYKVPSKKFKVLGNTDRHSIKKNLIGALLFDSGETAEATRLKRTARRRYTRRKNRICYLQEIFSNEMAKVDDSFFHRLEESFLVEEDKKHERHPIFGNIVDEVAYHEKYPTIYHLRKKLVDSTDKADLRLIYLALAHMIKFRGHFLIEGDLNPDNSDVDKLFIQLVQTYNQLFEENPINASGVDAKAILSARLSKSRRLENLIAQLPGEKKNGLFGNLIALSLGLTPNFKSNFDLAEDAKLQLSKDTYDDDLDNLLAQIGDQYADLFLAAKNLSDAILLSDILRVNTEITKAPLSASMIKRYDEHHQDLTLLKALVRQQLPEKYKEIFFDQSKNGYAGYIDGGASQEEFYKFIKPILEKMDGTEELLVKLNREDLLRKQRTFDNGSIPHQIHLGELHAILRRQEDFYPFLKDNREKIEKILTFRIPYYVGPLARGNSRFAWMTRKSEETITPWNFEEVVDKGASAQSFIERMTNFDKNLPNEKVLPKHSLLYEYFTVYNELTKVKYVTEGMRKPAFLSGEQKKAIVDLLFKTNRKVTVKQLKEDYFKKIECFDSVEISGVEDRFNASLGTYHDLLKIIKDKDFLDNEENEDILEDIVLTLTLFEDREMIEERLKTYAHLFDDKVMKQLKRRRYTGWGRLSRKLINGIRDKQSGKTILDFLKSDGFANRNFMQLIHDDSLTFKEDIQKAQVSGQGDSLHEHIANLAGSPAIKKGILQTVKVVDELVKVMGRHKPENIVIEMARENQTTQKGQKNSRERMKRIEEGIKELGSQILKEHPVENTQLQNEKLYLYYLQNGRDMYVDQELDINRLSDYDVDHIVPQSFLKDDSIDNKVLTRSDKARGKSDNVPSEEVVKKMKNYWRQLLNAKLITQRKFDNLTKAERGGLSELDKAGFIKRQLVETRQITKHVAQILDSRMNTKYDENDKLIREVKVITLKSKLVSDFRKDFQFYKVREINNYHHAHDAYLNAVVGTALIKKYPKLESEFVYGDYKVYDVRKMIAKSEQEIGKATAKYFFYSNIMNFFKTEITLANGEIRKRPLIETNGETGEIVWDKGRDFATVRKVLSMPQVNIVKKTEVQTGGFSKESILPKRNSDKLIARKKDWDPKKYGGFDSPTVAYSVLVVAKVEKGKSKKLKSVKELLGITIMERSSFEKNPIDFLEAKGYKEVKKDLIIKLPKYSLFELENGRKRMLASAGELQKGNELALPSKYVNFLYLASHYEKLKGSPEDNEQKQLFVEQHKHYLDEIIEQISEFSKRVILADANLDKVLSAYNKHRDKPIREQAENIIHLFTLTNLGAPAAFKYFDTTIDRKRYTSTKEVLDATLIHQSITGLYETRIDLSQLGGDGGGGGPAPGGSGGLLGRDLLTKLKAQIQFSTEGPQVTWEDRPAMCLVLNLEEEYRLHEKPVPPSIDPSWLQLFPMVWAEKAGMGLANQVPPVVVELKSDASPVAVRQYPMSKEAREGIRPHIQRFLDLGILVPCQSPWNTPLLPVKKPGTNDYRPVQDLREVNKRVQDIHPTVPNPYNLLSSLPPSHTWYSVLDLKDAFFCLKLHPNSQPLFAFEWRDPEKGNTGQLTWTRLPQGFKNSPTLFNEALHRDLASFRALNPQVVMLQYVDDLLVAAPTYRDCKEGTRRLLQELSKLGYRVSAKKAQLCREEVTYLGYLLKGGKRWLTPARKATVMKIPTPTTPRQVREFLGTAGFCRLWIPGFASLAAPLYPLTRPKVPFTWTEAHQEAFGRIKEALLSAPALALPDLTKPFALYVDEKEGVARGVLTQTLGPWRRPVAYLSKKLDPVASGWPTCLKAIAAVALLLKDADKLTLGQNVLVIAPHNLESIVRQPPDRWMTNARMTHYQSLLLNERVSFAPPAILNPATLLPVESDDTPIHICSEILAEETGTRPDLRDQPLPGVPAWYTDGSSFIMDGRRQAGAAIVDNKRTVWASNLPEGTSAQKAELIALTQALRLAEGKSINIYTDSRYAFATAHVHGAIYKQRGWLTSAGKDIKNKEEILALLEAIHLPKRVAIIHCPGHQRGTDPVATGNRKADEAAKQAAQSTRILTETTKNAGKRTADGSEFEKRTADGSEFESPKKKAKVE

SEQ ID NO: 7012 - protein, 2094 aa, synthetic construct
MPAAKRVKLDGGDKKYSIGLDIGTNSVGWAVITDEYKVPSKKFKVLGNTDRHSIKKNLIGALLFDSGETAEATRLKRTARRRYTRRKNRICYLQEIFSNEMAKVDDSFFHRLEESFLVEEDKKHERHPIFGNIVDEVAYHEKYPTIYHLRKKLVDSTDKADLRLIYLALAHMIKFRGHFLIEGDLNPDNSDVDKLFIQLVQTYNQLFEENPINASGVDAKAILSARLSKSRRLENLIAQLPGEKKNGLFGNLIALSLGLTPNFKSNFDLAEDAKLQLSKDTYDDDLDNLLAQIGDQYADLFLAAKNLSDAILLSDILRVNTEITKAPLSASMIKRYDEHHQDLTLLKALVRQQLPEKYKEIFFDQSKNGYAGYIDGGASQEEFYKFIKPILEKMDGTEELLVKLNREDLLRKQRTFDNGSIPHQIHLGELHAILRRQEDFYPFLKDNREKIEKILTFRIPYYVGPLARGNSRFAWMTRKSEETITPWNFEEVVDKGASAQSFIERMTNFDKNLPNEKVLPKHSLLYEYFTVYNELTKVKYVTEGMRKPAFLSGEQKKAIVDLLFKTNRKVTVKQLKEDYFKKIECFDSVEISGVEDRFNASLGTYHDLLKIIKDKDFLDNEENEDILEDIVLTLTLFEDREMIEERLKTYAHLFDDKVMKQLKRRRYTGWGRLSRKLINGIRDKQSGKTILDFLKSDGFANRNFMQLIHDDSLTFKEDIQKAQVSGQGDSLHEHIANLAGSPAIKKGILQTVKVVDELVKVMGRHKPENIVIEMARENQTTQKGQKNSRERMKRIEEGIKELGSQILKEHPVENTQLQNEKLYLYYLQNGRDMYVDQELDINRLSDYDVDHIVPQSFLKDDSIDNKVLTRSDKARGKSDNVPSEEVVKKMKNYWRQLLNAKLITQRKFDNLTKAERGGLSELDKAGFIKRQLVETRQITKHVAQILDSRMNTKYDENDKLIREVKVITLKSKLVSDFRKDFQFYKVREINNYHHAHDAYLNAVVGTALIKKYPKLESEFVYGDYKVYDVRKMIAKSEQEIGKATAKYFFYSNIMNFFKTEITLANGEIRKRPLIETNGETGEIVWDKGRDFATVRKVLSMPQVNIVKKTEVQTGGFSKESILPKRNSDKLIARKKDWDPKKYGGFDSPTVAYSVLVVAKVEKGKSKKLKSVKELLGITIMERSSFEKNPIDFLEAKGYKEVKKDLIIKLPKYSLFELENGRKRMLASAGELQKGNELALPSKYVNFLYLASHYEKLKGSPEDNEQKQLFVEQHKHYLDEIIEQISEFSKRVILADANLDKVLSAYNKHRDKPIREQAENIIHLFTLTNLGAPAAFKYFDTTIDRKRYTSTKEVLDATLIHQSITGLYETRIDLSQLGGDGGGGGPAPGGSGGTLGIEDEYRLHETSTEPDVSLGSTWLSDFPQAWAETGGMGLAVRQAPLIIPLKATSTPVSIQQYPMSHEARLGIKPHIQRLLDQGILVPCQSPWNTPLLPVKKPGTNDYRPVQDLREVNKRVEDIHPTVPNPYNLLSGLPPSHQWYTVLDLKDAFFCLRLHPTSQPLFAFEWRDPGMGISGQLTWTRLPQGFKNSPTLFNEALHRDLADFRIQHPDLILLQYVDDILLAATSELDCQQGTRALLQTLGDLGYRASAKKAQICQKQVKYLGYLLREGQRWLTEARKETVMGQPVPKTPRQLREFLGTAGFCRLWIPGFAEMAAPLYPLTKPGTLFSWGPDQQKAYQEIKQALLTAPALGLPDLTKPFELFVDEKQGYAKGVLTQKLGPWRRPVAYLSKKLDPVAAGWPPCLRMVAAIAVLTKDAGKLTMGQPLVILAPHAVEALVKQPPDRWLSNARMTHYQAMLLDTDRVQFGPVVALNPATLLPLPEEGAPHDCLEILAETHGTRPDLTDQPIPDADHTWYTDGSSFLQEGQRKAGAAVTTETEVIWAGALPAGTSAQRAELIALTQALKMAEGKRLNVYTDSRYAFATAHIHGEIYRRRGWLTSEGREIKNKSEILALLKALFLPKRLSIIHCLGHQKGDSAEARGNRLADQAAREAAIKTPPDTSTLLAGKRTADGSEFEKRTADGSEFESPKKKAKVE

SEQ ID NO: 7013 - protein, 2086 aa, synthetic construct
MPAAKRVKLDGGDKKYSIGLDIGTNSVGWAVITDEYKVPSKKFKVLGNTDRHSIKKNLIGALLFDSGETAEATRLKRTARRRYTRRKNRICYLQEIFSNEMAKVDDSFFHRLEESFLVEEDKKHERHPIFGNIVDEVAYHEKYPTIYHLRKKLVDSTDKADLRLIYLALAHMIKFRGHFLIEGDLNPDNSDVDKLFIQLVQTYNQLFEENPINASGVDAKAILSARLSKSRRLENLIAQLPGEKKNGLFGNLIALSLGLTPNFKSNFDLAEDAKLQLSKDTYDDDLDNLLAQIGDQYADLFLAAKNLSDAILLSDILRVNTEITKAPLSASMIKRYDEHHQDLTLLKALVRQQLPEKYKEIFFDQSKNGYAGYIDGGASQEEFYKFIKPILEKMDGTEELLVKLNREDLLRKQRTFDNGSIPHQIHLGELHAILRRQEDFYPFLKDNREKIEKILTFRIPYYVGPLARGNSRFAWMTRKSEETITPWNFEEVVDKGASAQSFIERMTNFDKNLPNEKVLPKHSLLYEYFTVYNELTKVKYVTEGMRKPAFLSGEQKKAIVDLLFKTNRKVTVKQLKEDYFKKIECFDSVEISGVEDRFNASLGTYHDLLKIIKDKDFLDNEENEDILEDIVLTLTLFEDREMIEERLKTYAHLFDDKVMKQLKRRRYTGWGRLSRKLINGIRDKQSGKTILDFLKSDGFANRNFMQLIHDDSLTFKEDIQKAQVSGQGDSLHEHIANLAGSPAIKKGILQTVKVVDELVKVMGRHKPENIVIEMARENQTTQKGQKNSRERMKRIEEGIKELGSQILKEHPVENTQLQNEKLYLYYLQNGRDMYVDQELDINRLSDYDVDHIVPQSFLKDDSIDNKVLTRSDKARGKSDNVPSEEVVKKMKNYWRQLLNAKLITQRKFDNLTKAERGGLSELDKAGFIKRQLVETRQITKHVAQILDSRMNTKYDENDKLIREVKVITLKSKLVSDFRKDFQFYKVREINNYHHAHDAYLNAVVGTALIKKYPKLESEFVYGDYKVYDVRKMIAKSEQEIGKATAKYFFYSNIMNFFKTEITLANGEIRKRPLIETNGETGEIVWDKGRDFATVRKVLSMPQVNIVKKTEVQTGGFSKESILPKRNSDKLIARKKDWDPKKYGGFDSPTVAYSVLVVAKVEKGKSKKLKSVKELLGITIMERSSFEKNPIDFLEAKGYKEVKKDLIIKLPKYSLFELENGRKRMLASAGELQKGNELALPSKYVNFLYLASHYEKLKGSPEDNEQKQLFVEQHKHYLDEIIEQISEFSKRVILADANLDKVLSAYNKHRDKPIREQAENIIHLFTLTNLGAPAAFKYFDTTIDRKRYTSTKEVLDATLIHQSITGLYETRIDLSQLGGDGGGGGPAPGGSGGLDDEYRLYSPLVKPDQNIQFWLEQFPQAWAETAGMGLAKQVPPQVIQLKASATPVSVRQYPLSKEAQEGIRPHVQRLIQQGILVPVQSPWNTPLLPVRKPGTNDYRPVQDLREVNKRVQDIHPTVPNPYNLLCALPPQRSWYTVLDLKDAFFCLRLHPTSQPLFAFEWRDPGTGRTGQLTWTRLPQGFKNSPTIFNEALHRDLANFRIQHPQVTLLQYVDDLLLAGATKQDCLEGTKALLLELSDLGYRASAKKAQICRREVTYLGYSLRDGQRWLTEARKKTVVQIPAPTTAKQVREFLGKAGFCRLFIPGFATLAAPLYPLTKPKGEFSWAPEHQKAFDAIKKALLSAPALALPDVTKPFTLYVDERKGVARGVLTQTLGPWRRPVAYLSKKLDPVASGWPVCLKAIAAVAILVKDADKLTLGQNITVIAPHALENIVRQPPDRWMTNARMTHYQSLLLTERVTFAPPAALNPATLLPEETDEPVTHDCHQLLIEETGVRKDLTDIPLTGEVLTWFTDGSSYVVEGKRMAGAAVVDGTRTIWASSLPEGTSAQKAELMALTQALRLAEGKSINIYTDSRYAFATAHVHGAIYKQRGWLTSAGREIKNKEEILSLLEALHLPKRLAIIHCPGHQKAKDPISRGNQMADRVAKQAAQGVNLLPAGKRTADGSEFEKRTADGSEFESPKKKAKVE

SEQ ID NO: 7014 - protein, 2088 aa, synthetic construct
MPAAKRVKLDGGDKKYSIGLDIGTNSVGWAVITDEYKVPSKKFKVLGNTDRHSIKKNLIGALLFDSGETAEATRLKRTARRRYTRRKNRICYLQEIFSNEMAKVDDSFFHRLEESFLVEEDKKHERHPIFGNIVDEVAYHEKYPTIYHLRKKLVDSTDKADLRLIYLALAHMIKFRGHFLIEGDLNPDNSDVDKLFIQLVQTYNQLFEENPINASGVDAKAILSARLSKSRRLENLIAQLPGEKKNGLFGNLIALSLGLTPNFKSNFDLAEDAKLQLSKDTYDDDLDNLLAQIGDQYADLFLAAKNLSDAILLSDILRVNTEITKAPLSASMIKRYDEHHQDLTLLKALVRQQLPEKYKEIFFDQSKNGYAGYIDGGASQEEFYKFIKPILEKMDGTEELLVKLNREDLLRKQRTFDNGSIPHQIHLGELHAILRRQEDFYPFLKDNREKIEKILTFRIPYYVGPLARGNSRFAWMTRKSEETITPWNFEEVVDKGASAQSFIERMTNFDKNLPNEKVLPKHSLLYEYFTVYNELTKVKYVTEGMRKPAFLSGEQKKAIVDLLFKTNRKVTVKQLKEDYFKKIECFDSVEISGVEDRFNASLGTYHDLLKIIKDKDFLDNEENEDILEDIVLTLTLFEDREMIEERLKTYAHLFDDKVMKQLKRRRYTGWGRLSRKLINGIRDKQSGKTILDFLKSDGFANRNFMQLIHDDSLTFKEDIQKAQVSGQGDSLHEHIANLAGSPAIKKGILQTVKVVDELVKVMGRHKPENIVIEMARENQTTQKGQKNSRERMKRIEEGIKELGSQILKEHPVENTQLQNEKLYLYYLQNGRDMYVDQELDINRLSDYDVDHIVPQSFLKDDSIDNKVLTRSDKARGKSDNVPSEEVVKKMKNYWRQLLNAKLITQRKFDNLTKAERGGLSELDKAGFIKRQLVETRQITKHVAQILDSRMNTKYDENDKLIREVKVITLKSKLVSDFRKDFQFYKVREINNYHHAHDAYLNAVVGTALIKKYPKLESEFVYGDYKVYDVRKMIAKSEQEIGKATAKYFFYSNIMNFFKTEITLANGEIRKRPLIETNGETGEIVWDKGRDFATVRKVLSMPQVNIVKKTEVQTGGFSKESILPKRNSDKLIARKKDWDPKKYGGFDSPTVAYSVLVVAKVEKGKSKKLKSVKELLGITIMERSSFEKNPIDFLEAKGYKEVKKDLIIKLPKYSLFELENGRKRMLASAGELQKGNELALPSKYVNFLYLASHYEKLKGSPEDNEQKQLFVEQHKHYLDEIIEQISEFSKRVILADANLDKVLSAYNKHRDKPIREQAENIIHLFTLTNLGAPAAFKYFDTTIDRKRYTSTKEVLDATLIHQSITGLYETRIDLSQLGGDGGGGGPAPGGSGGTLQLDDEYRLYSPLVKPDQNIQFWLEQFPQAWAETAGMGLAKQVPPQVIQLKASATPVSVRQYPLSKEAQEGIRPHVQRLIQQGILVPVQSPWNTPLLPVRKPGTNDYRPVQDLREVNKRVQDIHPTVPNPYNLLCALPPQRSWYTVLDLKDAFFCLRLHPTSQPLFAFEWRDPGTGRTGQLTWTRLPQGFKNSPTIFDEALHRDLANFRIQHPQVTLLQYVDDLLLAGATKQDCLEGTKALLLELSDLGYRASAKKAQICRREVTYLGYSLRDGQRWLTEARKKTVVQIPAPTTAKQVREFLGTAGFCRLWIPGFATLAAPLYPLTKEKGEFSWAPEHQKAFDAIKKALLSAPALALPDVTKPFTLYVDERKGVARGVLTQTLGPWRRPVAYLSKKLDPVASGWPVCLKAIAAVAILVKDADKLTLGQNITVIAPHALENIVRQPPDRWMTNARMTHYQSLLLTERVTFAPPAALNPATLLPEETDEPVTHDCHQLLIEETGVRKDLTDIPLTGEVLTWFTDGSSYVVEGKRMAGAAVVDGTRTIWASSLPEGTSAQKAELMALTQALRLAEGKSINIYTDSRYAFATAHVHGAIYKQRGLLTSAGREIKNKEEILSLLEALHLPKRLAIIHCPGHQKAKDPISRGNQMADRVAKQAAQGVNLLAGKRTADGSEFEKRTADGSEFESPKKKAKVE

SEQ ID NO: 7015 - protein, 2086 aa, synthetic construct; identical to SEQ ID NO: 7013

SEQ ID NO: 7016 - protein, 2085 aa, synthetic construct
MPAAKRVKLDGGDKKYSIGLDIGTNSVGWAVITDEYKVPSKKFKVLGNTDRHSIKKNLIGALLFDSGETAEATRLKRTARRRYTRRKNRICYLQEIFSNEMAKVDDSFFHRLEESFLVEEDKKHERHPIFGNIVDEVAYHEKYPTIYHLRKKLVDSTDKADLRLIYLALAHMIKFRGHFLIEGDLNPDNSDVDKLFIQLVQTYNQLFEENPINASGVDAKAILSARLSKSRRLENLIAQLPGEKKNGLFGNLIALSLGLTPNFKSNFDLAEDAKLQLSKDTYDDDLDNLLAQIGDQYADLFLAAKNLSDAILLSDILRVNTEITKAPLSASMIKRYDEHHQDLTLLKALVRQQLPEKYKEIFFDQSKNGYAGYIDGGASQEEFYKFIKPILEKMDGTEELLVKLNREDLLRKQRTFDNGSIPHQIHLGELHAILRRQEDFYPFLKDNREKIEKILTFRIPYYVGPLARGNSRFAWMTRKSEETITPWNFEEVVDKGASAQSFIERMTNFDKNLPNEKVLPKHSLLYEYFTVYNELTKVKYVTEGMRKPAFLSGEQKKAIVDLLFKTNRKVTVKQLKEDYFKKIECFDSVEISGVEDRFNASLGTYHDLLKIIKDKDFLDNEENEDILEDIVLTLTLFEDREMIEERLKTYAHLFDDKVMKQLKRRRYTGWGRLSRKLINGIRDKQSGKTILDFLKSDGFANRNFMQLIHDDSLTFKEDIQKAQVSGQGDSLHEHIANLAGSPAIKKGILQTVKVVDELVKVMGRHKPENIVIEMARENQTTQKGQKNSRERMKRIEEGIKELGSQILKEHPVENTQLQNEKLYLYYLQNGRDMYVDQELDINRLSDYDVDHIVPQSFLKDDSIDNKVLTRSDKARGKSDNVPSEEVVKKMKNYWRQLLNAKLITQRKFDNLTKAERGGLSELDKAGFIKRQLVETRQITKHVAQILDSRMNTKYDENDKLIREVKVITLKSKLVSDFRKDFQFYKVREINNYHHAHDAYLNAVVGTALIKKYPKLESEFVYGDYKVYDVRKMIAKSEQEIGKATAKYFFYSNIMNFFKTEITLANGEIRKRPLIETNGETGEIVWDKGRDFATVRKVLSMPQVNIVKKTEVQTGGFSKESILPKRNSDKLIARKKDWDPKKYGGFDSPTVAYSVLVVAKVEKGKSKKLKSVKELLGITIMERSSFEKNPIDFLEAKGYKEVKKDLIIKLPKYSLFELENGRKRMLASAGELQKGNELALPSKYVNFLYLASHYEKLKGSPEDNEQKQLFVEQHKHYLDEIIEQISEFSKRVILADANLDKVLSAYNKHRDKPIREQAENIIHLFTLTNLGAPAAFKYFDTTIDRKRYTSTKEVLDATLIHQSITGLYETRIDLSQLGGDGGGGGPAPGGSGGIPWLMKKPLQLTTLVPLQEYEERLLKQTMLTGSYKEKLQSLFLKYDALWQHWENQVGHRRIKPHHIATGTVNPRPQKQYPINPKAKASIQTVINDLLKQGVLIQQNSIMNTPVYPVPKPDGKWRMVLDYREVNKTIPLIAAQNQHSAGILSSIFRGKYKTTLDLSNGFWAHSITPESYWLTAFTWLGQQYCWTRLPQGFLNSPALFNADVVDLLKEVPNVQVYVDDIYISHDDPREHLEQLEKVFSLLLNAGYVVSLKKSEIAQHEVEFLGFNITKEGRGLTETFKQKLLNITPPRDLKQLQSILGLLNFARNFIPNFSELVKPLYNIIATAPGKYITWTTDNSQQLQNIISMLNSAENLEERNPEVRLIMKVNTSPSAGYIRFYNEFAKRPIMYLNYVYTKAEVKFTNTEKLLTTIHKGLIKALDLGMGQEILVYSPIVSMTKIQKTPLPERKALPIRWITWMSYLEDPRIQFHYDKTLPELQQVPTVTDDIIAKIKHPSEFSMVFYTDGSAIKHPNVNKSHNAGMGIAQVQFKPEFTVINTWSIPLGDHTAQLAEVAAVEFACKKALKIDGPVLIVTDSFYVAESVNKELPYWQSNGFFNNKKKPLKHVSKWKSIADCIQLKPDIIIIHEKGHQPTASTFHTEGNNLADKLATQGSYVVNAGKRTADGSEFEKRTADGSEFESPKKKAKVE

SEQ ID NO: 7017 - protein, 2092 aa, synthetic construct
MPAAKRVKLDGGDKKYSIGLDIGTNSVGWAVITDEYKVPSKKFKVLGNTDRHSIKKNLIGALLFDSGETAEATRLKRTARRRYTRRKNRICYLQEIFSNEMAKVDDSFFHRLEESFLVEEDKKHERHPIFGNIVDEVAYHEKYPTIYHLRKKLVDSTDKADLRLIYLALAHMIKFRGHFLIEGDLNPDNSDVDKLFIQLVQTYNQLFEENPINASGVDAKAILSARLSKSRRLENLIAQLPGEKKNGLFGNLIALSLGLTPNFKSNFDLAEDAKLQLSKDTYDDDLDNLLAQIGDQYADLFLAAKNLSDAILLSDILRVNTEITKAPLSASMIKRYDEHHQDLTLLKALVRQQLPEKYKEIFFDQSKNGYAGYIDGGASQEEFYKFIKPILEKMDGTEELLVKLNREDLLRKQRTFDNGSIPHQIHLGELHAILRRQEDFYPFLKDNREKIEKILTFRIPYYVGPLARGNSRFAWMTRKSEETITPWNFEEVVDKGASAQSFIERMTNFDKNLPNEKVLPKHSLLYEYFTVYNELTKVKYVTEGMRKPAFLSGEQKKAIVDLLFKTNRKVTVKQLKEDYFKKIECFDSVEISGVEDRFNASLGTYHDLLKIIKDKDFLDNEENEDILEDIVLTLTLFEDREMIEERLKTYAHLFDDKVMKQLKRRRYTGWGRLSRKLINGIRDKQSGKTILDFLKSDGFANRNFMQLIHDDSLTFKEDIQKAQVSGQGDSLHEHIANLAGSPAIKKGILQTVKVVDELVKVMGRHKPENIVIEMARENQTTQKGQKNSRERMKRIEEGIKELGSQILKEHPVENTQLQNEKLYLYYLQNGRDMYVDQELDINRLSDYDVDHIVPQSFLKDDSIDNKVLTRSDKARGKSDNVPSEEVVKKMKNYWRQLLNAKLITQRKFDNLTKAERGGLSELDKAGFIKRQLVETRQITKHVAQILDSRMNTKYDENDKLIREVKVITLKSKLVSDFRKDFQFYKVREINNYHHAHDAYLNAVVGTALIKKYPKLESEFVYGDYKVYDVRKMIAKSEQEIGKATAKYFFYSNIMNFFKTEITLANGEIRKRPLIETNGETGEIVWDKGRDFATVRKVLSMPQVNIVKKTEVQTGGFSKESILPKRNSDKLIARKKDWDPKKYGGFDSPTVAYSVLVVAKVEKGKSKKLKSVKELLGITIMERSSFEKNPIDFLEAKGYKEVKKDLIIKLPKYSLFELENGRKRMLASAGELQKGNELALPSKYVNFLYLASHYEKLKGSPEDNEQKQLFVEQHKHYLDEIIEQISEFSKRVILADANLDKVLSAYNKHRDKPIREQAENIIHLFTLTNLGAPAAFKYFDTTIDRKRYTSTKEVLDATLIHQSITGLYETRIDLSQLGGDGGGGGPAPGGSGGVLNLEEEYRLHEKPVPSSIDPSWLQLFPTVWAERAGMGLANQVPPVVVELRSGASPVAVRQYPMSKEAREGIRPHIQRFLDLGVLVPCQSPWNTPLLPVKKPGTNDYRPVQDLREINKRVQDIHPTVPNPYNLLSSLPPSHTWYSVLDLKDAFFCLKLHPNSQPLFAFEWRDPEKGNTGQLTWTRLPQGFKNSPTLFNEALHRDLAPFRALNPQVVLLQYVDDLLVAAPTYRDCKEGTQKLLQELSKLGYRVSAKKAQLCQKEVTYLGYLLKEGKRWLTPARKATVMKIPPPTTPRQVREFLGTAGFCRLWIPGFASLAAPLYPLTKPSIPFIWTEEHQKAFDRIKEALLSAPALALPDLTKPFTLYVDERAGVARGVLTQTLGPWRRPVAYLSKKLDPVASGWPTCLKAVAAVALLLKDADKLTLGQNVTVIASHSLESIVRQPPDRWMTNARMTHYQSLLLNERVSFAPPAVLNPATLLPVESEATPVHRCSEILAEETGTRRDLKDQPLPGVPAWYTDGSSFIAEGKRRAGAAIVDGKRTVWASSLPEGTSAQKAELVALTQALRLAEGKDINIYTDSRYAFATAHIHGAIYKQRGWLTSAGKDIKNKEEILALLEAIHLPKRVAIIHCPGHQKGNDPVATGNRRADEAAKQAALSTRVLAETTKPAGKRTADGSEFEKRTADGSEFESPKKKAKVE

SEQ ID NO: 7018 - protein, 2096 aa, synthetic construct
MPAAKRVKLDGGDKKYSIGLDIGTNSVGWAVITDEYKVPSKKFKVLGNTDRHSIKKNLIGALLFDSGETAEATRLKRTARRRYTRRKNRICYLQEIFSNEMAKVDDSFFHRLEESFLVEEDKKHERHPIFGNIVDEVAYHEKYPTIYHLRKKLVDSTDKADLRLIYLALAHMIKFRGHFLIEGDLNPDNSDVDKLFIQLVQTYNQLFEENPINASGVDAKAILSARLSKSRRLENLIAQLPGEKKNGLFGNLIALSLGLTPNFKSNFDLAEDAKLQLSKDTYDDDLDNLLAQIGDQYADLFLAAKNLSDAILLSDILRVNTEITKAPLSASMIKRYDEHHQDLTLLKALVRQQLPEKYKEIFFDQSKNGYAGYIDGGASQEEFYKFIKPILEKMDGTEELLVKLNREDLLRKQRTFDNGSIPHQIHLGELHAILRRQEDFYPFLKDNREKIEKILTFRIPYYVGPLARGNSRFAWMTRKSEETITPWNFEEVVDKGASAQSFIERMTNFDKNLPNEKVLPKHSLLYEYFTVYNELTKVKYVTEGMRKPAFLSGEQKKAIVDLLFKTNRKVTVKQLKEDYFKKIECFDSVEISGVEDRFNASLGTYHDLLKIIKDKDFLDNEENEDILEDIVLTLTLFEDREMIEERLKTYAHLFDDKVMKQLKRRRYTGWGRLSRKLINGIRDKQSGKTILDFLKSDGFANRNFMQLIHDDSLTFKEDIQKAQVSGQGDSLHEHIANLAGSPAIKKGILQTVKVVDELVKVMGRHKPENIVIEMARENQTTQKGQKNSRERMKRIEEGIKELGSQILKEHPVENTQLQNEKLYLYYLQNGRDMYVDQELDINRLSDYDVDHIVPQSFLKDDSIDNKVLTRSDKARGKSDNVPSEEVVKKMKNYWRQLLNAKLITQRKFDNLTKAERGGLSELDKAGFIKRQLVETRQITKHVAQILDSRMNTKYDENDKLIREVKVITLKSKLVSDFRKDFQFYKVREINNYHHAHDAYLNAVVGTALIKKYPKLESEFVYGDYKVYDVRKMIAKSEQEIGKATAKYFFYSNIMNFFKTEITLANGEIRKRPLIETNGETGEIVWDKGRDFATVRKVLSMPQVNIVKKTEVQTGGFSKESILPKRNSDKLIARKKDWDPKKYGGFDSPTVAYSVLVVAKVEKGKSKKLKSVKELLGITIMERSSFEKNPIDFLEAKGYKEVKKDLIIKLPKYSLFELENGRKRMLASAGELQKGNELALPSKYVNFLYLASHYEKLKGSPEDNEQKQLFVEQHKHYLDEIIEQISEFSKRVILADANLDKVLSAYNKHRDKPIREQAENIIHLFTLTNLGAPAAFKYFDTTIDRKRYTSTKEVLDATLIHQSITGLYETRIDLSQLGGDGGPAPGGSGGGGGTAPLEEEYRLFLEAPIQNVTLLEQWKREIPKVWAEINPPGLASTQAPIHVQLLSTALPVRVRQYPITLEAKRSLRETIRKFRAAGILRPVHSPWNTPLLPVRKSGTSEYRMVQDLREVNKRVETIHPTVPNPYTLLSLLPPDRIWYSVLDLKDAFFCIPLAPESQLIFAFEWADAEEGESGQLTWTRLPQGFKNSPTLFNEALNRDLQGFRLDHPSVSLLQYVDDLLIAADTQAACLSATRDLLMTLAELGYRVSGKKAQLCQEEVTYLGFKIHKGSRSLSNSRTQAILQIPVPKTKRQVREFLGTIGYCRLWIPGFAELAQPLYAATRPGNDPLVWGEKEEEAFQSLKLALTQPPALALPSLDKPFQLFVEETSGAAKGVLTQALGPWKRPVAYLSKRLDPVAAGWPRCLRAIAAAALLTREASKLTFGQDIEITSSHNLESLLRSPPDKWLTNARITQYQVLLLDPPRVRFKQTAALNPATLLPETDDTLPIHHCLDTLDSLTSTRPDLTDQPLAQAEATLFTDGSSYIRDGKRYAGAAVVTLDSVIWAEPLPIGTSAQKAELIALTKALEWSKDKSVNIYTDSRYAFATLHVHGMIYRERGWLTAGGKAIKNAPEILALLTAVWLPKRVAVMHCKGHQKDDAPTSTGNRRADEVAREVAIRPLSTQATISAGKRTADGSEFEKRTADGSEFESPKKKAKVE

SEQ ID NO: 7019 - protein, 2092 aa, synthetic construct
MPAAKRVKLDGGDKKYSIGLDIGTNSVGWAVITDEYKVPSKKFKVLGNTDRHSIKKNLIGALLFDSGETAEATRLKRTARRRYTRRKNRICYLQEIFSNEMAKVDDSFFHRLEESFLVEEDKKHERHPIFGNIVDEVAYHEKYPTIYHLRKKLVDSTDKADLRLIYLALAHMIKFRGHFLIEGDLNPDNSDVDKLFIQLVQTYNQLFEENPINASGVDAKAILSARLSKSRRLENLIAQLPGEKKNGLFGNLIALSLGLTPNFKSNFDLAEDAKLQLSKDTYDDDLDNLLAQIGDQYADLFLAAKNLSDAILLSDILRVNTEITKAPLSASMIKRYDEHHQDLTLLKALVRQQLPEKYKEIFFDQSKNGYAGYIDGGASQEEFYKFIKPILEKMDGTEELLVKLNREDLLRKQRTFDNGSIPHQIHLGELHAILRRQEDFYPFLKDNREKIEKILTFRIPYYVGPLARGNSRFAWMTRKSEETITPWNFEEVVDKGASAQSFIERMTNFDKNLPNEKVLPKHSLLYEYFTVYNELTKVKYVTEGMRKPAFLSGEQKKAIVDLLFKTNRKVTVKQLKEDYFKKIECFDSVEISGVEDRFNASLGTYHDLLKIIKDKDFLDNEENEDILEDIVLTLTLFEDREMIEERLKTYAHLFDDKVMKQLKRRRYTGWGRLSRKLINGIRDKQSGKTILDFLKSDGFANRNFMQLIHDDSLTFKEDIQKAQVSGQGDSLHEHIANLAGSPAIKKGILQTVKVVDELVKVMGRHKPENIVIEMARENQTTQKGQKNSRERMKRIEEGIKELGSQILKEHPVENTQLQNEKLYLYYLQNGRDMYVDQELDINRLSDYDVDHIVPQSFLKDDSIDNKVLTRSDKARGKSDNVPSEEVVKKMKNYWRQLLNAKLITQRKFDNLTKAERGGLSELDKAGFIKRQLVETRQITKHVAQILDSRMNTKYDENDKLIREVKVITLKSKLVSDFRKDFQFYKVREINNYHHAHDAYLNAVVGTALIKKYPKLESEFVYGDYKVYDVRKMIAKSEQEIGKATAKYFFYSNIMNFFKTEITLANGEIRKRPLIETNGETGEIVWDKGRDFATVRKVLSMPQVNIVKKTEVQTGGFSKESILPKRNSDKLIARKKDWDPKKYGGFDSPTVAYSVLVVAKVEKGKSKKLKSVKELLGITIMERSSFEKNPIDFLEAKGYKEVKKDLIIKLPKYSLFELENGRKRMLASAGELQKGNELALPSKYVNFLYLASHYEKLKGSPEDNEQKQLFVEQHKHYLDEIIEQISEFSKRVILADANLDKVLSAYNKHRDKPIREQAENIIHLFTLTNLGAPAAFKYFDTTIDRKRYTSTKEVLDATLIHQSITGLYETRIDLSQLGGDGGPAPGGSGGGGGVLNLEEEYRLHEKPVPSSIDPSWLQLFPTVWAERAGMGLANQVPPVVVELRSGASPVAVRQYPMSKEAREGIRPHIQKFLDLGVLVPCRSPWNTPLLPVKKPGTNDYRPVQDLREINKRVQDIHPTVPNPYNLLSSLPPSYTWYSVLDLKDAFFCLRLHPNSQPLFAFEWKDPEKGNTGQLTWTRLPQGFKNSPTLFNEALHRDLAPFRALNPQVVLLQYVDDLLVAAPTYEDCKKGTQKLLQELSKLGYRVSAKKAQLCQREVTYLGYLLKEGKRWLTPARKATVMKIPVPTTPRQVREFLGKAGFCRLFIPGFASLAAPLYPLTKPSIPFIWTEEHQQAFDHIKKALLSAPALALPDLTKPFTLYIDERAGVARGVLTQTLGPWRRPVAYLSKKLDPVASGWPTCLKAVAAVALLLKDADKLTLGQNVTVIASHSLESIVRQPPDRWMTNARMTHYQSLLLNERVSFAPPAVLNPATLLPVESEATPVHRCSEILAEETGTRRDLEDQPLPGVPTWYTDGSSFITEGKRRAGAPIVDGKRTVWASSLPEGTSAQKAELVALTQALRLAEGKNINIYTDSRYAFATAHIHGAIYKQRGWLTSAGKDIKNKEEILALLEAIHLPRRVAIIHCPGHQRGSNPVATGNRRADEAAKQAALSTRVLAGTTKPAGKRTADGSEFEKRTADGSEFESPKKKAKVE

SEQ ID NO: 7020 - protein, 2094 aa, synthetic construct
MPAAKRVKLDGGDKKYSIGLDIGTNSVGWAVITDEYKVPSKKFKVLGNTDRHSIKKNLIGALLFDSGETAEATRLKRTARRRYTRRKNRICYLQEIFSNEMAKVDDSFFHRLEESFLVEEDKKHERHPIFGNIVDEVAYHEKYPTIYHLRKKLVDSTDKADLRLIYLALAHMIKFRGHFLIEGDLNPDNSDVDKLFIQLVQTYNQLFEENPINASGVDAKAILSARLSKSRRLENLIAQLPGEKKNGLFGNLIALSLGLTPNFKSNFDLAEDAKLQLSKDTYDDDLDNLLAQIGDQYADLFLAAKNLSDAILLSDILRVNTEITKAPLSASMIKRYDEHHQDLTLLKALVRQQLPEKYKEIFFDQSKNGYAGYIDGGASQEEFYKFIKPILEKMDGTEELLVKLNREDLLRKQRTFDNGSIPHQIHLGELHAILRRQEDFYPFLKDNREKIEKILTFRIPYYVGPLARGNSRFAWMTRKSEETITPWNFEEVVDKGASAQSFIERMTNFDKNLPNEKVLPKHSLLYEYFTVYNELTKVKYVTEGMRKPAFLSGEQKKAIVDLLFKTNRKVTVKQLKEDYFKKIECFDSVEISGVEDRFNASLGTYHDLLKIIKDKDFLDNEENEDILEDIVLTLTLFEDREMIEERLKTYAHLFDDKVMKQLKRRRYTGWGRLSRKLINGIRDKQSGKTILDFLKSDGFANRNFMQLIHDDSLTFKEDIQKAQVSGQGDSLHEHIANLAGSPAIKKGILQTVKVVDELVKVMGRHKPENIVIEMARENQTTQKGQKNSRERMKRIEEGIKELGSQILKEHPVENTQLQNEKLYLYYLQNGRDMYVDQELDINRLSDYDVDHIVPQSFLKDDSIDNKVLTRSDKARGKSDNVPSEEVVKKMKNYWRQLLNAKLITQRKFDNLTKAERGGLSELDKAGFIKRQLVETRQITKHVAQILDSRMNTKYDENDKLIREVKVITLKSKLVSDFRKDFQFYKVREINNYHHAHDAYLNAVVGTALIKKYPKLESEFVYGDYKVYDVRKMIAKSEQEIGKATAKYFFYSNIMNFFKTEITLANGEIRKRPLIETNGETGEIVWDKGRDFATVRKVLSMPQVNIVKKTEVQTGGFSKESILPKRNSDKLIARKKDWDPKKYGGFDSPTVAYSVLVVAKVEKGKSKKLKSVKELLGITIMERSSFEKNPIDFLEAKGYKEVKKDLIIKLPKYSLFELENGRKRMLASAGELQKGNELALPSKYVNFLYLASHYEKLKGSPEDNEQKQLFVEQHKHYLDEIIEQISEFSKRVILADANLDKVLSAYNKHRDKPIREQAENIIHLFTLTNLGAPAAFKYFDTTIDRKRYTSTKEVLDATLIHQSITGLYETRIDLSQLGGDGGPAPGGSGGGGGTLNLEDEYRLYETSAEPEVSPGSTWLSDFPQAWAETGGMGLAVRQAPLIIPLKATSTPVSIKQYPMSQEAKLGIKPHIQRLLDQGILVPCQSPWNTPLLPVKKPGTNDYRPVQDLREVNKRVEDIHPTVPNPYNLLSGLPPSHRWYTVLDLKDAFFCLRLHPTSQPLFAFEWRDPGMGISGQLTWTRLPQGFKNSPTLFNEALHRDLADFRIQHPDLILLQYVDDILLAATSELDCQQGTRALLLTLGNLGYRASAKKAQLCQKQVKYLGYLLKEGQRWLTEARKETVMGQPTPKTPRQLREFLGKAGFCRLFIPGFAEMAAPLYPLTKPGTLFNWGPDQQKAYQEIKQALLTAPALGLPDLTKPFELFVDEKQGYAKGVLTQKLGPWRRPVAYLSKKLDPVAAGWPPCLRMVAAIAVLRKDAGKLTMGQPLVILAPHAVEALVKQPPDRWLSNARMTHYQAMLLDTDRVQFGPVVALNPATLLPLPEEGAPHDCLEILAETHGTRPDLTDQPIPDADHTWYTDGSSFLQEGQRKAGAAVTTETEVIWARALPAGTSAQRAELIALTQALKMAEGKRLNVYTDSRYAFATAHIHGEIYRRRGWLTSEGREIKNKSEILALLKALFLPKRLSIIHCLGHQKGDSAEARGNRLADQAAREAAIKTPPDTSTLLAGKRTADGSEFEKRTADGSEFESPKKKAKVE

SEQ ID NO: 7021 - protein, 2094 aa, synthetic construct
MPAAKRVKLDGGDKKYSIGLDIGTNSVGWAVITDEYKVPSKKFKVLGNTDRHSIKKNLIGALLFDSGETAEATRLKRTARRRYTRRKNRICYLQEIFSNEMAKVDDSFFHRLEESFLVEEDKKHERHPIFGNIVDEVAYHEKYPTIYHLRKKLVDSTDKADLRLIYLALAHMIKFRGHFLIEGDLNPDNSDVDKLFIQLVQTYNQLFEENPINASGVDAKAILSARLSKSRRLENLIAQLPGEKKNGLFGNLIALSLGLTPNFKSNFDLAEDAKLQLSKDTYDDDLDNLLAQIGDQYADLFLAAKNLSDAILLSDILRVNTEITKAPLSASMIKRYDEHHQDLTLLKALVRQQLPEKYKEIFFDQSKNGYAGYIDGGASQEEFYKFIKPILEKMDGTEELLVKLNREDLLRKQRTFDNGSIPHQIHLGELHAILRRQEDFYPFLKDNREKIEKILTFRIPYYVGPLARGNSRFAWMTRKSEETITPWNFEEVVDKGASAQSFIERMTNFDKNLPNEKVLPKHSLLYEYFTVYNELTKVKYVTEGMRKPAFLSGEQKKAIVDLLFKTNRKVTVKQLKEDYFKKIECFDSVEISGVEDRFNASLGTYHDLLKIIKDKDFLDNEENEDILEDIVLTLTLFEDREMIEERLKTYAHLFDDKVMKQLKRRRYTGWGRLSRKLINGIRDKQSGKTILDFLKSDGFANRNFMQLIHDDSLTFKEDIQKAQVSGQGDSLHEHIANLAGSPAIKKGILQTVKVVDELVKVMGRHKPENIVIEMARENQTTQKGQKNSRERMKRIEEGIKELGSQILKEHPVENTQLQNEKLYLYYLQNGRDMYVDQELDINRLSDYDVDHIVPQSFLKDDSIDNKVLTRSDKARGKSDNVPSEEVVKKMKNYWRQLLNAKLITQRKFDNLTKAERGGLSELDKAGFIKRQLVETRQITKHVAQILDSRMNTKYDENDKLIREVKVITLKSKLVSDFRKDFQFYKVREINNYHHAHDAYLNAVVGTALIKKYPKLESEFVYGDYKVYDVRKMIAKSEQEIGKATAKYFFYSNIMNFFKTEITLANGEIRKRPLIETNGETGEIVWDKGRDFATVRKVLSMPQVNIVKKTEVQTGGFSKESILPKRNSDKLIARKKDWDPKKYGGFDSPTVAYSVLVVAKVEKGKSKKLKSVKELLGITIMERSSFEKNPIDFLEAKGYKEVKKDLIIKLPKYSLFELENGRKRMLASAGELQKGNELALPSKYVNFLYLASHYEKLKGSPEDNEQKQLFVEQHKHYLDEIIEQISEFSKRVILADANLDKVLSAYNKHRDKPIREQAENIIHLFTLTNLGAPAAFKYFDTTIDRKRYTSTKEVLDATLIHQSITGLYETRIDLSQLGGDGGPAPGGSGGGGGTLGIEDEYRLHETSTEPDVSLGSTWLSDFPQAWAETGGMGLAVRQAPLIIPLKATSTPVSIQQYPMSHEARLGIKPHIQRLLDQGILVPCQSPWNTPLLPVKKPGTNDYRPVQDLREVNKRVEDIHPTVPNPYNLLSGLPPSHQWYTVLDLKDAFFCLRLHPTSQPLFAFEWRDPGMGISGQLTWTRLPQGFKNSPTLFDEALHRDLADFRIQHPDLILLQYVDDILLAATSELDCQQGTRALLQTLGDLGYRASAKKAQICQKQVKYLGYLLREGQRWLTEARKETVMGQPVPKTPRQLREFLGTAGFCRLWIPGFAEMAAPLYPLTKTGTLFSWGPDQQKAYQEIKQALLTAPALGLPDLTKPFELFVDEKQGYAKGVLTQKLGPWRRPVAYLSKKLDPVAAGWPPCLRMVAAIAVLTKDAGKLTMGQPLVILAPHAVEALVKQPPDRWLSNARMTHYQAMLLDTDRVQFGPVVALNPATLLPLPEEGAPHDCLEILAETHGTRPDLTDQPIPDADHTWYTDGSSFLQEGQRKAGAAVTTETEVIWAGALPAGTSAQRAELIALTQALKMAEGKRLNVYTDSRYAFATAHIHGEIYRRRGLLTSEGREIKNKSEILALLKALFLPKRLSIIHCLGHQKGDSAEARGNRLADQAAREAAIKTPPDTSTLLAGKRTADGSEFEKRTADGSEFESPKKKAKVE

SEQ ID NO: 7022 - protein, 2094 aa, synthetic construct
MPAAKRVKLDGGDKKYSIGLDIGTNSVGWAVITDEYKVPSKKFKVLGNTDRHSIKKNLIGALLFDSGETAEATRLKRTARRRYTRRKNRICYLQEIFSNEMAKVDDSFFHRLEESFLVEEDKKHERHPIFGNIVDEVAYHEKYPTIYHLRKKLVDSTDKADLRLIYLALAHMIKFRGHFLIEGDLNPDNSDVDKLFIQLVQTYNQLFEENPINASGVDAKAILSARLSKSRRLENLIAQLPGEKKNGLFGNLIALSLGLTPNFKSNFDLAEDAKLQLSKDTYDDDLDNLLAQIGDQYADLFLAAKNLSDAILLSDILRVNTEITKAPLSASMIKRYDEHHQDLTLLKALVRQQLPEKYKEIFFDQSKNGYAGYIDGGASQEEFYKFIKPILEKMDGTEELLVKLNREDLLRKQRTFDNGSIPHQIHLGELHAILRRQEDFYPFLKDNREKIEKILTFRIPYYVGPLARGNSRFAWMTRKSEETITPWNFEEVVDKGASAQSFIERMTNFDKNLPNEKVLPKHSLLYEYFTVYNELTKVKYVTEGMRKPAFLSGEQKKAIVDLLFKTNRKVTVKQLKEDYFKKIECFDSVEISGVEDRFNASLGTYHDLLKIIKDKDFLDNEENEDILEDIVLTLTLFEDREMIEERLKTYAHLFDDKVMKQLKRRRYTGWGRLSRKLINGIRDKQSGKTILDFLKSDGFANRNFMQLIHDDSLTFKEDIQKAQVSGQGDSLHEHIANLAGSPAIKKGILQTVKVVDELVKVMGRHKPENIVIEMARENQTTQKGQKNSRERMKRIEEGIKELGSQILKEHPVENTQLQNEKLYLYYLQNGRDMYVDQELDINRLSDYDVDHIVPQSFLKDDSIDNKVLTRSDKARGKSDNVPSEEVVKKMKNYWRQLLNAKLITQRKFDNLTKAERGGLSELDKAGFIKRQLVETRQITKHVAQILDSRMNTKYDENDKLIREVKVITLKSKLVSDFRKDFQFYKVREINNYHHAHDAYLNAVVGTALIKKYPKLESEFVYGDYKVYDVRKMIAKSEQEIGKATAKYFFYSNIMNFFKTEITLANGEIRKRPLIETNGETGEIVWDKGRDFATVRKVLSMPQVNIVKKTEVQTGGFSKESILPKRNSDKLIARKKDWDPKKYGGFDSPTVAYSVLVVAKVEKGKSKKLKSVKELLGITIMERSSFEKNPIDFLEAKGYKEVKKDLIIKLPKYSLFELENGRKRMLASAGELQKGNELALPSKYVNFLYLASHYEKLKGSPEDNEQKQLFVEQHKHYLDEIIEQISEFSKRVILADANLDKVLSAYNKHRDKPIREQAENIIHLFTLTNLGAPAAFKYFDTTIDRKRYTSTKEVLDATLIHQSITGLYETRIDLSQLGGDGGPAPGGSGGGGGTLNIEDEHRLHETSKEPDVSLGSTWLSDFPQAWAETGGMGLAVRQAPLIIPLKATSTPVSIKQYPMSQEARLGIKPHIQRLLDQGILVPCQSPWNTPLLPVKKPGTNDYRPVQDLREVNKRVEDIHPTVPNPYNLLSGLPPSHQWYTVLDLKDAFFCLRLHPTSQPLFAFEWRDPEMGISGQLTWTRLPQGFKNSPTLFDEALHRDLADFRIQHPDLILLQYVDDLLLAATSELDCQQGTRALLQTLGNLGYRASAKKAQICQKQVKYLGYLLKEGQRWLTEARKETVMGQPTPKTPRQLREFLGTAGFCRLWIPGFAEMAAPLYPLTKTGTLFNWGPDQQKAYQEIKQALLTAPALGLPDLTKPFELFVDEKQGYAKGVLTQKLGPWRRPVAYLSKKLDPVAAGWPPCLRMVAAIAVLTKDAGKLTMGQPLVILAPHAVEALVKQPPDRWLSNARMTHYQALLLDTDRVQFGPVVALNPATLLPLPEEGLQHNCLDILAEAHGTRPDLTDQPLPDADHTWYTDGSSLLQEGQRKAGAAVTTETEVIWAKALPAGTSAQRAELIALTQALKMAEGKKLNVYTDSRYAFATAHIHGEIYRRRGLLTSEGKEIKNKDEILALLKALFLPKRLSIIHCPGHQKGHSAEARGNRMADQAARKAAITETPDTSTLLAGKRTADGSEFEKRTADGSEFESPKKKAKVE

SEQ ID NO: 7023 - protein, 2088 aa, synthetic construct
MPAAKRVKLDGGDKKYSIGLDIGTNSVGWAVITDEYKVPSKKFKVLGNTDRHSIKKNLIGALLFDSGETAEATRLKRTARRRYTRRKNRICYLQEIFSNEMAKVDDSFFHRLEESFLVEEDKKHERHPIFGNIVDEVAYHEKYPTIYHLRKKLVDSTDKADLRLIYLALAHMIKFRGHFLIEGDLNPDNSDVDKLFIQLVQTYNQLFEENPINASGVDAKAILSARLSKSRRLENLIAQLPGEKKNGLFGNLIALSLGLTPNFKSNFDLAEDAKLQLSKDTYDDDLDNLLAQIGDQYADLFLAAKNLSDAILLSDILRVNTEITKAPLSASMIKRYDEHHQDLTLLKALVRQQLPEKYKEIFFDQSKNGYAGYIDGGASQEEFYKFIKPILEKMDGTEELLVKLNREDLLRKQRTFDNGSIPHQIHLGELHAILRRQEDFYPFLKDNREKIEKILTFRIPYYVGPLARGNSRFAWMTRKSEETITPWNFEEVVDKGASAQSFIERMTNFDKNLPNEKVLPKHSLLYEYFTVYNELTKVKYVTEGMRKPAFLSGEQKKAIVDLLFKTNRKVTVKQLKEDYFKKIECFDSVEISGVEDRFNASLGTYHDLLKIIKDKDFLDNEENEDILEDIVLTLTLFEDREMIEERLKTYAHLFDDKVMKQLKRRRYTGWGRLSRKLINGIRDKQSGKTILDFLKSDGFANRNFMQLIHDDSLTFKEDIQKAQVSGQGDSLHEHIANLAGSPAIKKGILQTVKVVDELVKVMGRHKPENIVIEMARENQTTQKGQKNSRERMKRIEEGIKELGSQILKEHPVENTQLQNEKLYLYYLQNGRDMYVDQELDINRLSDYDVDHIVPQSFLKDDSIDNKVLTRSDKARGKSDNVPSEEVVKKMKNYWRQLLNAKLITQRKFDNLTKAERGGLSELDKAGFIKRQLVETRQITKHVAQILDSRMNTKYDENDKLIREVKVITLKSKLVSDFRKDFQFYKVREINNYHHAHDAYLNAVVGTALIKKYPKLESEFVYGDYKVYDVRKMIAKSEQEIGKATAKYFFYSNIMNFFKTEITLANGEIRKRPLIETNGETGEIVWDKGRDFATVRKVLSMPQVNIVKKTEVQTGGFSKESILPKRNSDKLIARKKDWDPKKYGGFDSPTVAYSVLVVAKVEKGKSKKLKSVKELLGITIMERSSFEKNPIDFLEAKGYKEVKKDLIIKLPKYSLFELENGRKRMLASAGELQKGNELALPSKYVNFLYLASHYEKLKGSPEDNEQKQLFVEQHKHYLDEIIEQISEFSKRVILADANLDKVLSAYNKHRDKPIREQAENIIHLFTLTNLGAPAAFKYFDTTIDRKRYTSTKEVLDATLIHQSITGLYETRIDLSQLGGDGGPAPGGSGGGGGTLQLDDEYRLYSPLVKPDQNIQFWLEQFPQAWAETAGMGLAKQVPPQVIQLKASATPVSVRQYPLSKEAQEGIRPHVQRLIQQGILVPVQSPWNTPLLPVRKPGTNDYRPVQDLREVNKRVQDIHPTVPNPYNLLCALPPQRSWYTVLDLKDAFFCLRLHPTSQPLFAFEWRDPGTGRTGQLTWTRLPQGFKNSPTIFDEALHRDLANFRIQHPQVTLLQYVDDLLLAGATKQDCLEGTKALLLELSDLGYRASAKKAQICRREVTYLGYSLRDGQRWLTEARKKTVVQIPAPTTAKQVREFLGTAGFCRLWIPGFATLAAPLYPLTKEKGEFSWAPEHQKAFDAIKKALLSAPALALPDVTKPFTLYVDERKGVARGVLTQTLGPWRRPVAYLSKKLDPVASGWPVCLKAIAAVAILVKDADKLTLGQNITVIAPHALENIVRQPPDRWMTNARMTHYQSLLLTERVTFAPPAALNPATLLPEETDEPVTHDCHQLLIEETGVRKDLTDIPLTGEVLTWFTDGSSYVVEGKRMAGAAVVDGTRTIWASSLPEGTSAQKAELMALTQALRLAEGKSINIYTDSRYAFATAHVHGAIYKQRGLLTSAGREIKNKEEILSLLEALHLPKRLAIIHCPGHQKAKDPISRGNQMADRVAKQAAQGVNLLAGKRTADGSEFEKRTADGSEFESPKKKAKVE

SEQ ID NO: 7024 - protein, 2085 aa, synthetic construct
MPAAKRVKLDGGDKKYSIGLDIGTNSVGWAVITDEYKVPSKKFKVLGNTDRHSIKKNLIGALLFDSGETAEATRLKRTARRRYTRRKNRICYLQEIFSNEMAKVDDSFFHRLEESFLVEEDKKHERHPIFGNIVDEVAYHEKYPTIYHLRKKLVDSTDKADLRLIYLALAHMIKFRGHFLIEGDLNPDNSDVDKLFIQLVQTYNQLFEENPINASGVDAKAILSARLSKSRRLENLIAQLPGEKKNGLFGNLIALSLGLTPNFKSNFDLAEDAKLQLSKDTYDDDLDNLLAQIGDQYADLFLAAKNLSDAILLSDILRVNTEITKAPLSASMIKRYDEHHQDLTLLKALVRQQLPEKYKEIFFDQSKNGYAGYIDGGASQEEFYKFIKPILEKMDGTEELLVKLNREDLLRKQRTFDNGSIPHQIHLGELHAILRRQEDFYPFLKDNREKIEKILTFRIPYYVGPLARGNSRFAWMTRKSEETITPWNFEEVVDKGASAQSFIERMTNFDKNLPNEKVLPKHSLLYEYFTVYNELTKVKYVTEGMRKPAFLSGEQKKAIVDLLFKTNRKVTVKQLKEDYFKKIECFDSVEISGVEDRFNASLGTYHDLLKIIKDKDFLDNEENEDILEDIVLTLTLFEDREMIEERLKTYAHLFDDKVMKQLKRRRYTGWGRLSRKLINGIRDKQSGKTILDFLKSDGFANRNFMQLIHDDSLTFKEDIQKAQVSGQGDSLHEHIANLAGSPAIKKGILQTVKVVDELVKVMGRHKPENIVIEMARENQTTQKGQKNSRERMKRIEEGIKELGSQILKEHPVENTQLQNEKLYLYYLQNGRDMYVDQELDINRLSDYDVDHIVPQSFLKDDSIDNKVLTRSDKARGKSDNVPSEEVVKKMKNYWRQLLNAKLITQRKFDNLTKAERGGLSELDKAGFIKRQLVETRQITKHVAQILDSRMNTKYDENDKLIREVKVITLKSKLVSDFRKDFQFYKVREINNYHHAHDAYLNAVVGTALIKKYPKLESEFVYGDYKVYDVRKMIAKSEQEIGKATAKYFFYSNIMNFFKTEITLANGEIRKRPLIETNGETGEIVWDKGRDFATVRKVLSMPQVNIVKKTEVQTGGFSKESILPKRNSDKLIARKKDWDPKKYGGFDSPTVAYSVLVVAKVEKGKSKKLKSVKELLGITIMERSSFEKNPIDFLEAKGYKEVKKDLIIKLPKYSLFELENGRKRMLASAGELQKGNELALPSKYVNFLYLASHYEKLKGSPEDNEQKQLFVEQHKHYLDEIIEQISEFSKRVILADANLDKVLSAYNKHRDKPIREQAENIIHLFTLTNLGAPAAFKYFDTTIDRKRYTSTKEVLDATLIHQSITGLYETRIDLSQLGGDGGPAPGGSGGGGGIPWLMKKPLQLTTLVPLQEYEERLLKQTMLTGSYKEKLQSLFLKYDALWQHWENQVGHRRIKPHHIATGTVNPRPQKQYPINPKAKASIQTVINDLLKQGVLIQQNSIMNTPVYPVPKPDGKWRMVLDYREVNKTIPLIAAQNQHSAGILSSIFRGKYKTTLDLSNGFWAHSITPESYWLTAFTWLGQQYCWTRLPQGFLNSPALFNADVVDLLKEVPNVQVYVDDIYISHDDPREHLEQLEKVFSLLLNAGYVVSLKKSEIAQHEVEFLGFNITKEGRGLTETFKQKLLNITPPRDLKQLQSILGKLNFARNFIPNFSELVKPLYNIIATAPGKYITWTTDNSQQLQNIISMLNSAENLEERNPEVRLIMKVNTSPSAGYIRFYNEFAKRPIMYLNYVYTKAEVKFTNTEKLLTTIHKGLIKALDLGMGQEILVYSPIVSMTKIQKTPLPERKALPIRWITWMSYLEDPRIQFHYDKTLPELQQVPTVTDDIIAKIKHPSEFSMVFYTDGSAIKHPNVNKSHNAGMGIAQVQFKPEFTVINTWSIPLGDHTAQLAEVAAVEFACKKALKIDGPVLIVTDSFYVAESVNKELPYWQSNGFFNNKKKPLKHVSKWKSIADCIQLKPDIIIIHEKGHQPTASTFHTEGNNLADKLATQGSYVVNAGKRTADGSEFEKRTADGSEFESPKKKAKVE

SEQ ID NO: 7025 - protein, 2096 aa, synthetic construct
MPAAKRVKLDGGDKKYSIGLDIGTNSVGWAVITDEYKVPSKKFKVLGNTDRHSIKKNLIGALLFDSGETAEATRLKRTARRRYTRRKNRICYLQEIFSNEMAKVDDSFFHRLEESFLVEEDKKHERHPIFGNIVDEVAYHEKYPTIYHLRKKLVDSTDKADLRLIYLALAHMIKFRGHFLIEGDLNPDNSDVDKLFIQLVQTYNQLFEENPINASGVDAKAILSARLSKSRRLENLIAQLPGEKKNGLFGNLIALSLGLTPNFKSNFDLAEDAKLQLSKDTYDDDLDNLLAQIGDQYADLFLAAKNLSDAILLSDILRVNTEITKAPLSASMIKRYDEHHQDLTLLKALVRQQLPEKYKEIFFDQSKNGYAGYIDGGASQEEFYKFIKPILEKMDGTEELLVKLNREDLLRKQRTFDNGSIPHQIHLGELHAILRRQEDFYPFLKDNREKIEKILTFRIPYYVGPLARGNSRFAWMTRKSEETITPWNFEEVVDKGASAQSFIERMTNFDKNLPNEKVLPKHSLLYEYFTVYNELTKVKYVTEGMRKPAFLSGEQKKAIVDLLFKTNRKVTVKQLKEDYFKKIECFDSVEISGVEDRFNASLGTYHDLLKIIKDKDFLDNEENEDILEDIVLTLTLFEDREMIEERLKTYAHLFDDKVMKQLKRRRYTGWGRLSRKLINGIRDKQSGKTILDFLKSDGFANRNFMQLIHDDSLTFKEDIQKAQVSGQGDSLHEHIANLAGSPAIKKGILQTVKVVDELVKVMGRHKPENIVIEMARENQTTQKGQKNSRERMKRIEEGIKELGSQILKEHPVENTQLQNEKLYLYYLQNGRDMYVDQELDINRLSDYDVDHIVPQSFLKDDSIDNKVLTRSDKARGKSDNVPSEEVVKKMKNYWRQLLNAKLITQRKFDNLTKAERGGLSELDKAGFIKRQLVETRQITKHVAQILDSRMNTKYDENDKLIREVKVITLKSKLVSDFRKDFQFYKVREINNYHHAHDAYLNAVVGTALIKKYPKLESEFVYGDYKVYDVRKMIAKSEQEIGKATAKYFFYSNIMNFFKTEITLANGEIRKRPLIETNGETGEIVWDKGRDFATVRKVLSMPQVNIVKKTEVQTGGFSKESILPKRNSDKLIARKKDWDPKKYGGFDSPTVAYSVLVVAKVEKGKSKKLKSVKELLGITIMERSSFEKNPIDFLEAKGYKEVKKDLIIKLPKYSLFELENGRKRMLASAGELQKGNELALPSKYVNFLYLASHYEKLKGSPEDNEQKQLFVEQHKHYLDEIIEQISEFSKRVILADANLDKVLSAYNKHRDKPIREQAENIIHLFTLTNLGAPAAFKYFDTTIDRKRYTSTKEVLDATLIHQSITGLYETRIDLSQLGGDGGPAPGGGGGSGGTAPLEEEYRLFLEAPIQNVTLLEQWKREIPKVWAEINPPGLASTQAPIHVQLLSTALPVRVRQYPITLEAKRSLRETIRKFRAAGILRPVHSPWNTPLLPVRKSGTSEYRMVQDLREVNKRVETIHPTVPNPYTLLSLLPPDRIWYSVLDLKDAFFCIPLAPESQLIFAFEWADAEEGESGQLTWTRLPQGFKNSPTLFDEALNRDLQGFRLDHPSVSLLQYVDDLLIAADTQAACLSATRDLLMTLAELGYRVSGKKAQLCQEEVTYLGFKIHKGSRSLSNSRTQAILQIPVPKTKRQVREFLGTIGYCRLWIPGFAELAQPLYAATRGGNDPLVWGEKEEEAFQSLKLALTQPPALALPSLDKPFQLFVEETSGAAKGVLTQALGPWKRPVAYLSKRLDPVAAGWPRCLRAIAAAALLTREASKLTFGQDIEITSSHNLESLLRSPPDKWLTNARITQYQVLLLDPPRVRFKQTAALNPATLLPETDDTLPIHHCLDTLDSLTSTRPDLTDQPLAQAEATLFTDGSSYIRDGKRYAGAAVVTLDSVIWAEPLPIGTSAQKAELIALTKALEWSKDKSVNIYTDSRYAFATLHVHGMIYRERGLLTAGGKAIKNAPEILALLTAVWLPKRVAVMHCKGHQKDDAPTSTGNRRADEVAREVAIRPLSTQATISAGKRTADGSEFEKRTADGSEFESPKKKAKVE

SEQ ID NO: 7026 - protein, 2100 aa, synthetic construct
MPAAKRVKLDGGDKKYSIGLDIGTNSVGWAVITDEYKVPSKKFKVLGNTDRHSIKKNLIGALLFDSGETAEATRLKRTARRRYTRRKNRICYLQEIFSNEMAKVDDSFFHRLEESFLVEEDKKHERHPIFGNIVDEVAYHEKYPTIYHLRKKLVDSTDKADLRLIYLALAHMIKFRGHFLIEGDLNPDNSDVDKLFIQLVQTYNQLFEENPINASGVDAKAILSARLSKSRRLENLIAQLPGEKKNGLFGNLIALSLGLTPNFKSNFDLAEDAKLQLSKDTYDDDLDNLLAQIGDQYADLFLAAKNLSDAILLSDILRVNTEITKAPLSASMIKRYDEHHQDLTLLKALVRQQLPEKYKEIFFDQSKNGYAGYIDGGASQEEFYKFIKPILEKMDGTEELLVKLNREDLLRKQRTFDNGSIPHQIHLGELHAILRRQEDFYPFLKDNREKIEKILTFRIPYYVGPLARGNSRFAWMTRKSEETITPWNFEEVVDKGASAQSFIERMTNFDKNLPNEKVLPKHSLLYEYFTVYNELTKVKYVTEGMRKPAFLSGEQKKAIVDLLFKTNRKVTVKQLKEDYFKKIECFDSVEISGVEDRFNASLGTYHDLLKIIKDKDFLDNEENEDILEDIVLTLTLFEDREMIEERLKTYAHLFDDKVMKQLKRRRYTGWGRLSRKLINGIRDKQSGKTILDFLKSDGFANRNFMQLIHDDSLTFKEDIQKAQVSGQGDSLHEHIANLAGSPAIKKGILQTVKVVDELVKVMGRHKPENIVIEMARENQTTQKGQKNSRERMKRIEEGIKELGSQILKEHPVENTQLQNEKLYLYYLQNGRDMYVDQELDINRLSDYDVDHIVPQSFLKDDSIDNKVLTRSDKARGKSDNVPSEEVVKKMKNYWRQLLNAKLITQRKFDNLTKAERGGLSELDKAGFIKRQLVETRQITKHVAQILDSRMNTKYDENDKLIREVKVITLKSKLVSDFRKDFQFYKVREINNYHHAHDAYLNAVVGTALIKKYPKLESEFVYGDYKVYDVRKMIAKSEQEIGKATAKYFFYSNIMNFFKTEITLANGEIRKRPLIETNGETGEIVWDKGRDFATVRKVLSMPQVNIVKKTEVQTGGFSKESILPKRNSDKLIARKKDWDPKKYGGFDSPTVAYSVLVVAKVEKGKSKKLKSVKELLGITIMERSSFEKNPIDFLEAKGYKEVKKDLIIKLPKYSLFELENGRKRMLASAGELQKGNELALPSKYVNFLYLASHYEKLKGSPEDNEQKQLFVEQHKHYLDEIIEQISEFSKRVILADANLDKVLSAYNKHRDKPIREQAENIIHLFTLTNLGAPAAFKYFDTTIDRKRYTSTKEVLDATLIHQSITGLYETRIDLSQLGGDGGPAPGGGGGSGGTVSLQDEHRLFDIPVTTSLPDVWLQDFPQAWAETGGLGRAKCQAPIIIDLKPTAVPVSIKQYPMSLEAHMGIRQHIIKFLELGVLRPCRSPWNTPLLPVKKPGTQDYRPVQDLREINKRTVDIHPTVPNPYNLLSTLKPDYSWYTVLDLKDAFFCLPLAPQSQELFAFEWKDPERGISGQLTWTRLPQGFKNSPTLFNEALHRDLTDFRTQHPEVTLLQYVDDLLLAAPTKKACTQGTRHLLQELGEKGYRASAKKAQICQTKVTYLGYILSEGKRWLTPGRIETVARIPPPRNPREVREFLGTAGFCRLWIPGFAELAAPLYALTKPSTPFTWQTEHQLAFEALKKALLSAPALGLPDTSKPFTLFLDERQGIAKGVLTQKLGPWKRPVAYLSKKLDPVAAGWPPCLRIMAATAMLVKDSAKLTLGQPLTVITPHTLEAIVRQPPDRWITNARLTHYQALLLDTDRVQFGPPVTLNPATLLPVPENQPSPHDCRQVLAETHGTREDLKDQELPDADHTWYTDGSSYLDSGTRRAGAAVVDGHNTIWAQSLPPGTSAQKAELIALTKALELSKGKKANIYTDSRYAFATAHTHGSIYERRGWLTSEGKEIKNKAEIIALLKALFLPQEVAIIHCPGHQKGQDPVAVGNRQADRVARQAAMAEVLTLATEPDNTSHITAGKRTADGSEFEKRTADGSEFESPKKKAKVE

SEQ ID NO: 7027 - protein, 2171 aa, synthetic construct
MPAAKRVKLDGGDKKYSIGLDIGTNSVGWAVITDEYKVPSKKFKVLGNTDRHSIKKNLIGALLFDSGETAEATRLKRTARRRYTRRKNRICYLQEIFSNEMAKVDDSFFHRLEESFLVEEDKKHERHPIFGNIVDEVAYHEKYPTIYHLRKKLVDSTDKADLRLIYLALAHMIKFRGHFLIEGDLNPDNSDVDKLFIQLVQTYNQLFEENPINASGVDAKAILSARLSKSRRLENLIAQLPGEKKNGLFGNLIALSLGLTPNFKSNFDLAEDAKLQLSKDTYDDDLDNLLAQIGDQYADLFLAAKNLSDAILLSDILRVNTEITKAPLSASMIKRYDEHHQDLTLLKALVRQQLPEKYKEIFFDQSKNGYAGYIDGGASQEEFYKFIKPILEKMDGTEELLVKLNREDLLRKQRTFDNGSIPHQIHLGELHAILRRQEDFYPFLKDNREKIEKILTFRIPYYVGPLARGNSRFAWMTRKSEETITPWNFEEVVDKGASAQSFIERMTNFDKNLPNEKVLPKHSLLYEYFTVYNELTKVKYVTEGMRKPAFLSGEQKKAIVDLLFKTNRKVTVKQLKEDYFKKIECFDSVEISGVEDRFNASLGTYHDLLKIIKDKDFLDNEENEDILEDIVLTLTLFEDREMIEERLKTYAHLFDDKVMKQLKRRRYTGWGRLSRKLINGIRDKQSGKTILDFLKSDGFANRNFMQLIHDDSLTFKEDIQKAQVSGQGDSLHEHIANLAGSPAIKKGILQTVKVVDELVKVMGRHKPENIVIEMARENQTTQKGQKNSRERMKRIEEGIKELGSQILKEHPVENTQLQNEKLYLYYLQNGRDMYVDQELDINRLSDYDVDHIVPQSFLKDDSIDNKVLTRSDKARGKSDNVPSEEVVKKMKNYWRQLLNAKLITQRKFDNLTKAERGGLSELDKAGFIKRQLVETRQITKHVAQILDSRMNTKYDENDKLIREVKVITLKSKLVSDFRKDFQFYKVREINNYHHAHDAYLNAVVGTALIKKYPKLESEFVYGDYKVYDVRKMIAKSEQEIGKATAKYFFYSNIMNFFKTEITLANGEIRKRPLIETNGETGEIVWDKGRDFATVRKVLSMPQVNIVKKTEVQTGGFSKESILPKRNSDKLIARKKDWDPKKYGGFDSPTVAYSVLVVAKVEKGKSKKLKSVKELLGITIMERSSFEKNPIDFLEAKGYKEVKKDLIIKLPKYSLFELENGRKRMLASAGELQKGNELALPSKYVNFLYLASHYEKLKGSPEDNEQKQLFVEQHKHYLDEIIEQISEFSKRVILADANLDKVLSAYNKHRDKPIREQAENIIHLFTLTNLGAPAAFKYFDTTIDRKRYTSTKEVLDATLIHQSITGLYETRIDLSQLGGDGGPAPGGGGGSGGMDLLKPLTVERKGVKIKGYWNSQADITCVPKDLLQGEEPVRQQNVTTIHGTQEGDVYYVNLKIDGRRINTEVIGTTLDYAIITPGDVPWILKKPLELTIKLDLEEQQGTLLNNSILSKKGKEELKQLFEKYSALWQSWENQVGHRRIRPHKIATGTVKPTPQKQYHINPKAKPDIQIVINDLLKQGVLIQKESTMNTPVYPVPKPNGRWRMVLDYRAVNKVTPLIAVQNQHSYGILGSLFKGRYKTTIDLSNGFWAHPIVPEDYWITAFTWQGKQYCWTVLPQGFLNSPGLFTGDVVDLLQGIPNVEVYVDDVYISHDSEKEHLEYLDILFNRLKEAGYIISLKKSNIANSIVDFLGFQITNEGRGLTDTFKEKLENITAPTTLKQLQSILGLLNFARNFIPDFTELIAPLYALIPKSTKNYVPWQIEHSTTLETLITKLNGAEYLQGRKGDKTLIMKVNASYTTGYIRYYNEGEKKPISYVSIVFSKTELKFTELEKLLTTVHKGLLKALDLSMGQNIHVYSPIVSMQNIQKTPQTAKKALASRWLSWLSYLEDPRIRFFYDPQMPALKDLPAVDTGKDNKKHPSNFQHIFYTDGSAITSPTKEGHLNAGMGIVYFINKDGNLQKQQEWSISLGNHTAQFAEIAAFEFALKKCLPLGGNILVVTDSNYVAKAYNEELDVWASNGFVNNRKKPLKHISKWKSVADLKRLRPDVVVTHEPGHQKLDSSPHAYGNNLADQLATQASFKVHAGKRTADGSEFEKRTADGSEFESPKKKAKVE

SEQ ID NO: 7028 - protein, 2085 aa, synthetic construct
MPAAKRVKLDGGDKKYSIGLDIGTNSVGWAVITDEYKVPSKKFKVLGNTDRHSIKKNLIGALLFDSGETAEATRLKRTARRRYTRRKNRICYLQEIFSNEMAKVDDSFFHRLEESFLVEEDKKHERHPIFGNIVDEVAYHEKYPTIYHLRKKLVDSTDKADLRLIYLALAHMIKFRGHFLIEGDLNPDNSDVDKLFIQLVQTYNQLFEENPINASGVDAKAILSARLSKSRRLENLIAQLPGEKKNGLFGNLIALSLGLTPNFKSNFDLAEDAKLQLSKDTYDDDLDNLLAQIGDQYADLFLAAKNLSDAILLSDILRVNTEITKAPLSASMIKRYDEHHQDLTLLKALVRQQLPEKYKEIFFDQSKNGYAGYIDGGASQEEFYKFIKPILEKMDGTEELLVKLNREDLLRKQRTFDNGSIPHQIHLGELHAILRRQEDFYPFLKDNREKIEKILTFRIPYYVGPLARGNSRFAWMTRKSEETITPWNFEEVVDKGASAQSFIERMTNFDKNLPNEKVLPKHSLLYEYFTVYNELTKVKYVTEGMRKPAFLSGEQKKAIVDLLFKTNRKVTVKQLKEDYFKKIECFDSVEISGVEDRFNASLGTYHDLLKIIKDKDFLDNEENEDILEDIVLTLTLFEDREMIEERLKTYAHLFDDKVMKQLKRRRYTGWGRLSRKLINGIRDKQSGKTILDFLKSDGFANRNFMQLIHDDSLTFKEDIQKAQVSGQGDSLHEHIANLAGSPAIKKGILQTVKVVDELVKVMGRHKPENIVIEMARENQTTQKGQKNSRERMKRIEEGIKELGSQILKEHPVENTQLQNEKLYLYYLQNGRDMYVDQELDINRLSDYDVDHIVPQSFLKDDSIDNKVLTRSDKARGKSDNVPSEEVVKKMKNYWRQLLNAKLITQRKFDNLTKAERGGLSELDKAGFIKRQLVETRQITKHVAQILDSRMNTKYDENDKLIREVKVITLKSKLVSDFRKDFQFYKVREINNYHHAHDAYLNAVVGTALIKKYPKLESEFVYGDYKVYDVRKMIAKSEQEIGKATAKYFFYSNIMNFFKTEITLANGEIRKRPLIETNGETGEIVWDKGRDFATVRKVLSMPQVNIVKKTEVQTGGFSKESILPKRNSDKLIARKKDWDPKKYGGFDSPTVAYSVLVVAKVEKGKSKKLKSVKELLGITIMERSSFEKNPIDFLEAKGYKEVKKDLIIKLPKYSLFELENGRKRMLASAGELQKGNELALPSKYVNFLYLASHYEKLKGSPEDNEQKQLFVEQHKHYLDEIIEQISEFSKRVILADANLDKVLSAYNKHRDKPIREQAENIIHLFTLTNLGAPAAFKYFDTTIDRKRYTSTKEVLDATLIHQSITGLYETRIDLSQLGGDGGPAPGGGGGSGGVPWILKKPLELTIKLDLEEQQGTLLNNSILSKKGKEELKQLFEKYSALWQSWENQVGHRRIRPHKIATGTVKPTPQKQYHINPKAKPDIQIVINDLLKQGVLIQKESTMNTPVYPVPKPNGRWRMVLDYRAVNKVTPLIAVQNQHSYGILGSLFKGRYKTTIDLSNGFWAHPIVPEDYWITAFTWQGKQYCWTVLPQGFLNSPGLFTGDVVDLLQGIPNVEVYVDDVYISHDSEKEHLEYLDILFNRLKEAGYIISLKKSNIANSIVDFLGFQITNEGRGLTDTFKEKLENITAPTTLKQLQSILGLLNFARNFIPDFTELIAPLYALIPKSTKNYVPWQIEHSTTLETLITKLNGAEYLQGRKGDKTLIMKVNASYTTGYIRYYNEGEKKPISYVSIVFSKTELKFTELEKLLTTVHKGLLKALDLSMGQNIHVYSPIVSMQNIQKTPQTAKKALASRWLSWLSYLEDPRIRFFYDPQMPALKDLPAVDTGKDNKKHPSNFQHIFYTDGSAITSPTKEGHLNAGMGIVYFINKDGNLQKQQEWSISLGNHTAQFAEIAAFEFALKKCLPLGGNILVVTDSNYVAKAYNEELDVWASNGFVNNRKKPLKHISKWKSVADLKRLRPDVVVTHEPGHQKLDSSPHAYGNNLADQLATQASFKVHAGKRTADGSEFEKRTADGSEFESPKKKAKVE

SEQ ID NO: 7029 - protein, 2093 aa, synthetic construct
MPAAKRVKLDGGDKKYSIGLDIGTNSVGWAVITDEYKVPSKKFKVLGNTDRHSIKKNLIGALLFDSGETAEATRLKRTARRRYTRRKNRICYLQEIFSNEMAKVDDSFFHRLEESFLVEEDKKHERHPIFGNIVDEVAYHEKYPTIYHLRKKLVDSTDKADLRLIYLALAHMIKFRGHFLIEGDLNPDNSDVDKLFIQLVQTYNQLFEENPINASGVDAKAILSARLSKSRRLENLIAQLPGEKKNGLFGNLIALSLGLTPNFKSNFDLAEDAKLQLSKDTYDDDLDNLLAQIGDQYADLFLAAKNLSDAILLSDILRVNTEITKAPLSASMIKRYDEHHQDLTLLKALVRQQLPEKYKEIFFDQSKNGYAGYIDGGASQEEFYKFIKPILEKMDGTEELLVKLNREDLLRKQRTFDNGSIPHQIHLGELHAILRRQEDFYPFLKDNREKIEKILTFRIPYYVGPLARGNSRFAWMTRKSEETITPWNFEEVVDKGASAQSFIERMTNFDKNLPNEKVLPKHSLLYEYFTVYNELTKVKYVTEGMRKPAFLSGEQKKAIVDLLFKTNRKVTVKQLKEDYFKKIECFDSVEISGVEDRFNASLGTYHDLLKIIKDKDFLDNEENEDILEDIVLTLTLFEDREMIEERLKTYAHLFDDKVMKQLKRRRYTGWGRLSRKLINGIRDKQSGKTILDFLKSDGFANRNFMQLIHDDSLTFKEDIQKAQVSGQGDSLHEHIANLAGSPAIKKGILQTVKVVDELVKVMGRHKPENIVIEMARENQTTQKGQKNSRERMKRIEEGIKELGSQILKEHPVENTQLQNEKLYLYYLQNGRDMYVDQELDINRLSDYDVDHIVPQSFLKDDSIDNKVLTRSDKARGKSDNVPSEEVVKKMKNYWRQLLNAKLITQRKFDNLTKAERGGLSELDKAGFIKRQLVETRQITKHVAQILDSRMNTKYDENDKLIREVKVITLKSKLVSDFRKDFQFYKVREINNYHHAHDAYLNAVVGTALIKKYPKLESEFVYGDYKVYDVRKMIAKSEQEIGKATAKYFFYSNIMNFFKTEITLANGEIRKRPLIETNGETGEIVWDKGRDFATVRKVLSMPQVNIVKKTEVQTGGFSKESILPKRNSDKLIARKKDWDPKKYGGFDSPTVAYSVLVVAKVEKGKSKKLKSVKELLGITIMERSSFEKNPIDFLEAKGYKEVKKDLIIKLPKYSLFELENGRKRMLASAGELQKGNELALPSKYVNFLYLASHYEKLKGSPEDNEQKQLFVEQHKHYLDEIIEQISEFSKRVILADANLDKVLSAYNKHRDKPIREQAENIIHLFTLTNLGAPAAFKYFDTTIDRKRYTSTKEVLDATLIHQSITGLYETRIDLSQLGGDGGPAPGGGGGSGGTLQLEEEYRLFEPESTQKQEMDIWLKNFPQAWAETGGMGTAHCQAPVLIQLKATATPISIRQYPMPHEAYQGIKPHIRRMLDQGILKPCQSPWNTPLLPVKKPGTEDYRPVQDLREVNKRVEDIHPTVPNPYNLLSTLPPSHPWYTVLDLKDAFFCLRLHSESQLLFAFEWRDPEIGLSGQLTWTRLPQGFKNSPTLFNEALHSDLADFRVRYPALVLLQYVDDLLLAAATRTECLEGTKALLETLGNKGYRASAKKAQICLQEVTYLGYSLKDGQRWLTKARKEAILSIPVPKNSRQVREFLGTAGYCRLWIPGFAELAAPLYPLTRPGTLFQWGTEQQLAFEDIKKALLSSPALGLPDITKPFELFIDENSGFAKGVLVQKLGPWKRPVAYLSKKLDTVASGWPPCLRMVAAIAILVKDAGKLTLGQPLTILTSHPVEALVRQPPNKWLSNARMTHYQAMLLDAERVHFGPTVSLNPATLLPLPSGGNHHDCLQILAETHGTRPDLTDQPLPDADLTWYTDGSSFIRNGEREAGAAVTTESEVIWAAPLPPGTSAQRAELIALTQALKMAEGKKLTVYTDSRYAFATTHVHGEIYRRRGWLTSEGKEIKNKNEILALLEALFLPKRLSIIHCPGHQKGDSPQAKGNRLADDTAKKAATETHSSLTVLPAGKRTADGSEFEKRTADGSEFESPKKKAKVE

SEQ ID NO: 7030 - protein, 2125 aa, synthetic construct
MPAAKRVKLDGGDKKYSIGLDIGTNSVGWAVITDEYKVPSKKFKVLGNTDRHSIKKNLIGALLFDSGETAEATRLKRTARRRYTRRKNRICYLQEIFSNEMAKVDDSFFHRLEESFLVEEDKKHERHPIFGNIVDEVAYHEKYPTIYHLRKKLVDSTDKADLRLIYLALAHMIKFRGHFLIEGDLNPDNSDVDKLFIQLVQTYNQLFEENPINASGVDAKAILSARLSKSRRLENLIAQLPGEKKNGLFGNLIALSLGLTPNFKSNFDLAEDAKLQLSKDTYDDDLDNLLAQIGDQYADLFLAAKNLSDAILLSDILRVNTEITKAPLSASMIKRYDEHHQDLTLLKALVRQQLPEKYKEIFFDQSKNGYAGYIDGGASQEEFYKFIKPILEKMDGTEELLVKLNREDLLRKQRTFDNGSIPHQIHLGELHAILRRQEDFYPFLKDNREKIEKILTFRIPYYVGPLARGNSRFAWMTRKSEETITPWNFEEVVDKGASAQSFIERMTNFDKNLPNEKVLPKHSLLYEYFTVYNELTKVKYVTEGMRKPAFLSGEQKKAIVDLLFKTNRKVTVKQLKEDYFKKIECFDSVEISGVEDRFNASLGTYHDLLKIIKDKDFLDNEENEDILEDIVLTLTLFEDREMIEERLKTYAHLFDDKVMKQLKRRRYTGWGRLSRKLINGIRDKQSGKTILDFLKSDGFANRNFMQLIHDDSLTFKEDIQKAQVSGQGDSLHEHIANLAGSPAIKKGILQTVKVVDELVKVMGRHKPENIVIEMARENQTTQKGQKNSRERMKRIEEGIKELGSQILKEHPVENTQLQNEKLYLYYLQNGRDMYVDQELDINRLSDYDVDHIVPQSFLKDDSIDNKVLTRSDKARGKSDNVPSEEVVKKMKNYWRQLLNAKLITQRKFDNLTKAERGGLSELDKAGFIKRQLVETRQITKHVAQILDSRMNTKYDENDKLIREVKVITLKSKLVSDFRKDFQFYKVREINNYHHAHDAYLNAVVGTALIKKYPKLESEFVYGDYKVYDVRKMIAKSEQEIGKATAKYFFYSNIMNFFKTEITLANGEIRKRPLIETNGETGEIVWDKGRDFATVRKVLSMPQVNIVKKTEVQTGGFSKESILPKRNSDKLIARKKDWDPKKYGGFDSPTVAYSVLVVAKVEKGKSKKLKSVKELLGITIMERSSFEKNPIDFLEAKGYKEVKKDLIIKLPKYSLFELENGRKRMLASAGELQKGNELALPSKYVNFLYLASHYEKLKGSPEDNEQKQLFVEQHKHYLDEIIEQISEFSKRVILADANLDKVLSAYNKHRDKPIREQAENIIHLFTLTNLGAPAAFKYFDTTIDRKRYTSTKEVLDATLIHQSITGLYETRIDLSQLGGDGGPAPGGGGGSGGLLGRDLLTKLKAQIQFSTEGPQVTWEDRPAMCLVLNLEEEYRLHEKPVPPSIDPSWLQLFPMVWAEKAGMGLANQVPPVVVELKSDASPVAVRQYPMSKEAREGIRPHIQRFLDLGILVPCQSPWNTPLLPVKKPGTNDYRPVQDLREVNKRVQDIHPTVPNPYNLLSSLPPSHTWYSVLDLKDAFFCLKLHPNSQPLFAFEWRDPEKGNTGQLTWTRLPQGFKNSPTLFNEALHRDLASFRALNPQVVMLQYVDDLLVAAPTYRDCKEGTRRLLQELSKLGYRVSAKKAQLCREEVTYLGYLLKGGKRWLTPARKATVMKIPTPTTPRQVREFLGTAGFCRLWIPGFASLAAPLYPLTRPKVPFTWTEAHQEAFGRIKEALLSAPALALPDLTKPFALYVDEKEGVARGVLTQTLGPWRRPVAYLSKKLDPVASGWPTCLKAIAAVALLLKDADKLTLGQNVLVIAPHNLESIVRQPPDRWMTNARMTHYQSLLLNERVSFAPPAILNPATLLPVESDDTPIHICSEILAEETGTRPDLRDQPLPGVPAWYTDGSSFIMDGRRQAGAAIVDNKRTVWASNLPEGTSAQKAELIALTQALRLAEGKSINIYTDSRYAFATAHVHGAIYKQRGWLTSAGKDIKNKEEILALLEAIHLPKRVAIIHCPGHQRGTDPVATGNRKADEAAKQAAQSTRILTETTKNAGKRTADGSEFEKRTADGSEFESPKKKAKVE

SEQ ID NO: 7031 - protein, 2125 aa, synthetic construct
MPAAKRVKLDGGDKKYSIGLDIGTNSVGWAVITDEYKVPSKKFKVLGNTDRHSIKKNLIGALLFDSGETAEATRLKRTARRRYTRRKNRICYLQEIFSNEMAKVDDSFFHRLEESFLVEEDKKHERHPIFGNIVDEVAYHEKYPTIYHLRKKLVDSTDKADLRLIYLALAHMIKFRGHFLIEGDLNPDNSDVDKLFIQLVQTYNQLFEENPINASGVDAKAILSARLSKSRRLENLIAQLPGEKKNGLFGNLIALSLGLTPNFKSNFDLAEDAKLQLSKDTYDDDLDNLLAQIGDQYADLFLAAKNLSDAILLSDILRVNTEITKAPLSASMIKRYDEHHQDLTLLKALVRQQLPEKYKEIFFDQSKNGYAGYIDGGASQEEFYKFIKPILEKMDGTEELLVKLNREDLLRKQRTFDNGSIPHQIHLGELHAILRRQEDFYPFLKDNREKIEKILTFRIPYYVGPLARGNSRFAWMTRKSEETITPWNFEEVVDKGASAQSFIERMTNFDKNLPNEKVLPKHSLLYEYFTVYNELTKVKYVTEGMRKPAFLSGEQKKAIVDLLFKTNRKVTVKQLKEDYFKKIECFDSVEISGVEDRFNASLGTYHDLLKIIKDKDFLDNEENEDILEDIVLTLTLFEDREMIEERLKTYAHLFDDKVMKQLKRRRYTGWGRLSRKLINGIRDKQSGKTILDFLKSDGFANRNFMQLIHDDSLTFKEDIQKAQVSGQGDSLHEHIANLAGSPAIKKGILQTVKVVDELVKVMGRHKPENIVIEMARENQTTQKGQKNSRERMKRIEEGIKELGSQILKEHPVENTQLQNEKLYLYYLQNGRDMYVDQELDINRLSDYDVDHIVPQSFLKDDSIDNKVLTRSDKARGKSDNVPSEEVVKKMKNYWRQLLNAKLITQRKFDNLTKAERGGLSELDKAGFIKRQLVETRQITKHVAQILDSRMNTKYDENDKLIREVKVITLKSKLVSDFRKDFQFYKVREINNYHHAHDAYLNAVVGTALIKKYPKLESEFVYGDYKVYDVRKMIAKSEQEIGKATAKYFFYSNIMNFFKTEITLANGEIRKRPLIETNGETGEIVWDKGRDFATVRKVLSMPQVNIVKKTEVQTGGFSKESILPKRNSDKLIARKKDWDPKKYGGFDSPTVAYSVLVVAKVEKGKSKKLKSVKELLGITIMERSSFEKNPIDFLEAKGYKEVKKDLIIKLPKYSLFELENGRKRMLASAGELQKGNELALPSKYVNFLYLASHYEKLKGSPEDNEQKQLFVEQHKHYLDEIIEQISEFSKRVILADANLDKVLSAYNKHRDKPIREQAENIIHLFTLTNLGAPAAFKYFDTTIDRKRYTSTKEVLDATLIHQSITGLYETRIDLSQLGGDGGPAPGGGGGSGGLLGRDLLTKLKAQIQFSTEGPQVTWEDRPAMCLVLNLEEEYRLHEKPVPPSIDPSWLQLFPMVWAEKAGMGLANQVPPVVVELKSDASPVAVRQYPMSKEAREGIRPHIQRFLDLGILVPCQSPWNTPLLPVKKPGTNDYRPVQDLREVNKRVQDIHPTVPNPYNLLSSLPPSHTWYSVLDLKDAFFCLKLHPNSQPLFAFEWRDPEKGNTGQLTWTRLPQGFKNSPTLFNEALHRDLASFRALNPQVVMLQYVDDLLVAAPTYRDCKEGTRRLLQELSKLGYRVSAKKAQLCREEVTYLGYLLKGGKRWLTPARKATVMKIPTPTTPRQVREFLGKAGFCRLFIPGFASLAAPLYPLTRPKVPFTWTEAHQEAFGRIKEALLSAPALALPDLTKPFALYVDEKEGVARGVLTQTLGPWRRPVAYLSKKLDPVASGWPTCLKAIAAVALLLKDADKLTLGQNVLVIAPHNLESIVRQPPDRWMTNARMTHYQSLLLNERVSFAPPAILNPATLLPVESDDTPIHICSEILAEETGTRPDLRDQPLPGVPAWYTDGSSFIMDGRRQAGAAIVDNKRTVWASNLPEGTSAQKAELIALTQALRLAEGKSINIYTDSRYAFATAHVHGAIYKQRGWLTSAGKDIKNKEEILALLEAIHLPKRVAIIHCPGHQRGTDPVATGNRKADEAAKQAAQSTRILTETTKNAGKRTADGSEFEKRTADGSEFESPKKKAKVE

SEQ ID NO: 7032 - protein, 2094 aa, synthetic construct
MPAAKRVKLDGGDKKYSIGLDIGTNSVGWAVITDEYKVPSKKFKVLGNTDRHSIKKNLIGALLFDSGETAEATRLKRTARRRYTRRKNRICYLQEIFSNEMAKVDDSFFHRLEESFLVEEDKKHERHPIFGNIVDEVAYHEKYPTIYHLRKKLVDSTDKADLRLIYLALAHMIKFRGHFLIEGDLNPDNSDVDKLFIQLVQTYNQLFEENPINASGVDAKAILSARLSKSRRLENLIAQLPGEKKNGLFGNLIALSLGLTPNFKSNFDLAEDAKLQLSKDTYDDDLDNLLAQIGDQYADLFLAAKNLSDAILLSDILRVNTEITKAPLSASMIKRYDEHHQDLTLLKALVRQQLPEKYKEIFFDQSKNGYAGYIDGGASQEEFYKFIKPILEKMDGTEELLVKLNREDLLRKQRTFDNGSIPHQIHLGELHAILRRQEDFYPFLKDNREKIEKILTFRIPYYVGPLARGNSRFAWMTRKSEETITPWNFEEVVDKGASAQSFIERMTNFDKNLPNEKVLPKHSLLYEYFTVYNELTKVKYVTEGMRKPAFLSGEQKKAIVDLLFKTNRKVTVKQLKEDYFKKIECFDSVEISGVEDRFNASLGTYHDLLKIIKDKDFLDNEENEDILEDIVLTLTLFEDREMIEERLKTYAHLFDDKVMKQLKRRRYTGWGRLSRKLINGIRDKQSGKTILDFLKSDGFANRNFMQLIHDDSLTFKEDIQKAQVSGQGDSLHEHIANLAGSPAIKKGILQTVKVVDELVKVMGRHKPENIVIEMARENQTTQKGQKNSRERMKRIEEGIKELGSQILKEHPVENTQLQNEKLYLYYLQNGRDMYVDQELDINRLSDYDVDHIVPQSFLKDDSIDNKVLTRSDKARGKSDNVPSEEVVKKMKNYWRQLLNAKLITQRKFDNLTKAERGGLSELDKAGFIKRQLVETRQITKHVAQILDSRMNTKYDENDKLIREVKVITLKSKLVSDFRKDFQFYKVREINNYHHAHDAYLNAVVGTALIKKYPKLESEFVYGDYKVYDVRKMIAKSEQEIGKATAKYFFYSNIMNFFKTEITLANGEIRKRPLIETNGETGEIVWDKGRDFATVRKVLSMPQVNIVKKTEVQTGGFSKESILPKRNSDKLIARKKDWDPKKYGGFDSPTVAYSVLVVAKVEKGKSKKLKSVKELLGITIMERSSFEKNPIDFLEAKGYKEVKKDLIIKLPKYSLFELENGRKRMLASAGELQKGNELALPSKYVNFLYLASHYEKLKGSPEDNEQKQLFVEQHKHYLDEIIEQISEFSKRVILADANLDKVLSAYNKHRDKPIREQAENIIHLFTLTNLGAPAAFKYFDTTIDRKRYTSTKEVLDATLIHQSITGLYETRIDLSQLGGDGGPAPGGGGGSGGTLNLEDEYRLYETSAEPEVSPGSTWLSDFPQAWAETGGMGLAVRQAPLIIPLKATSTPVSIKQYPMSQEAKLGIKPHIQRLLDQGILVPCQSPWNTPLLPVKKPGTNDYRPVQDLREVNKRVEDIHPTVPNPYNLLSGLPPSHRWYTVLDLKDAFFCLRLHPTSQPLFAFEWRDPGMGISGQLTWTRLPQGFKNSPTLFNEALHRDLADFRIQHPDLILLQYVDDILLAATSELDCQQGTRALLLTLGNLGYRASAKKAQLCQKQVKYLGYLLKEGQRWLTEARKETVMGQPTPKTPRQLREFLGKAGFCRLFIPGFAEMAAPLYPLTKPGTLFNWGPDQQKAYQEIKQALLTAPALGLPDLTKPFELFVDEKQGYAKGVLTQKLGPWRRPVAYLSKKLDPVAAGWPPCLRMVAAIAVLRKDAGKLTMGQPLVILAPHAVEALVKQPPDRWLSNARMTHYQAMLLDTDRVQFGPVVALNPATLLPLPEEGAPHDCLEILAETHGTRPDLTDQPIPDADHTWYTDGSSFLQEGQRKAGAAVTTETEVIWARALPAGTSAQRAELIALTQALKMAEGKRLNVYTDSRYAFATAHIHGEIYRRRGWLTSEGREIKNKSEILALLKALFLPKRLSIIHCLGHQKGDSAEARGNRLADQAAREAAIKTPPDTSTLLAGKRTADGSEFEKRTADGSEFESPKKKAKVE

SEQ ID NO: 7033 - protein, 2094 aa, synthetic construct
MPAAKRVKLDGGDKKYSIGLDIGTNSVGWAVITDEYKVPSKKFKVLGNTDRHSIKKNLIGALLFDSGETAEATRLKRTARRRYTRRKNRICYLQEIFSNEMAKVDDSFFHRLEESFLVEEDKKHERHPIFGNIVDEVAYHEKYPTIYHLRKKLVDSTDKADLRLIYLALAHMIKFRGHFLIEGDLNPDNSDVDKLFIQLVQTYNQLFEENPINASGVDAKAILSARLSKSRRLENLIAQLPGEKKNGLFGNLIALSLGLTPNFKSNFDLAEDAKLQLSKDTYDDDLDNLLAQIGDQYADLFLAAKNLSDAILLSDILRVNTEITKAPLSASMIKRYDEHHQDLTLLKALVRQQLPEKYKEIFFDQSKNGYAGYIDGGASQEEFYKFIKPILEKMDGTEELLVKLNREDLLRKQRTFDNGSIPHQIHLGELHAILRRQEDFYPFLKDNREKIEKILTFRIPYYVGPLARGNSRFAWMTRKSEETITPWNFEEVVDKGASAQSFIERMTNFDKNLPNEKVLPKHSLLYEYFTVYNELTKVKYVTEGMRKPAFLSGEQKKAIVDLLFKTNRKVTVKQLKEDYFKKIECFDSVEISGVEDRFNASLGTYHDLLKIIKDKDFLDNEENEDILEDIVLTLTLFEDREMIEERLKTYAHLFDDKVMKQLKRRRYTGWGRLSRKLINGIRDKQSGKTILDFLKSDGFANRNFMQLIHDDSLTFKEDIQKAQVSGQGDSLHEHIANLAGSPAIKKGILQTVKVVDELVKVMGRHKPENIVIEMARENQTTQKGQKNSRERMKRIEEGIKELGSQILKEHPVENTQLQNEKLYLYYLQNGRDMYVDQELDINRLSDYDVDHIVPQSFLKDDSIDNKVLTRSDKARGKSDNVPSEEVVKKMKNYWRQLLNAKLITQRKFDNLTKAERGGLSELDKAGFIKRQLVETRQITKHVAQILDSRMNTKYDENDKLIREVKVITLKSKLVSDFRKDFQFYKVREINNYHHAHDAYLNAVVGTALIKKYPKLESEFVYGDYKVYDVRKMIAKSEQEIGKATAKYFFYSNIMNFFKTEITLANGEIRKRPLIETNGETGEIVWDKGRDFATVRKVLSMPQVNIVKKTEVQTGGFSKESILPKRNSDKLIARKKDWDPKKYGGFDSPTVAYSVLVVAKVEKGKSKKLKSVKELLGITIMERSSFEKNPIDFLEAKGYKEVKKDLIIKLPKYSLFELENGRKRMLASAGELQKGNELALPSKYVNFLYLASHYEKLKGSPEDNEQKQLFVEQHKHYLDEIIEQISEFSKRVILADANLDKVLSAYNKHRDKPIREQAENIIHLFTLTNLGAPAAFKYFDTTIDRKRYTSTKEVLDATLIHQSITGLYETRIDLSQLGGDGGPAPGGGGGSGGTLGIEDEYRLHETSTEPDVSLGSTWLSDFPQAWAETGGMGLAVRQAPLIIPLKATSTPVSIQQYPMSHEARLGIKPHIQRLLDQGILVPCQSPWNTPLLPVKKPGTNDYRPVQDLREVNKRVEDIHPTVPNPYNLLSGLPPSHQWYTVLDLKDAFFCLRLHPTSQPLFAFEWRDPGMGISGQLTWTRLPQGFKNSPTLFNEALHRDLADFRIQHPDLILLQYVDDILLAATSELDCQQGTRALLQTLGDLGYRASAKKAQICQKQVKYLGYLLREGQRWLTEARKETVMGQPVPKTPRQLREFLGTAGFCRLWIPGFAEMAAPLYPLTKPGTLFSWGPDQQKAYQEIKQALLTAPALGLPDLTKPFELFVDEKQGYAKGVLTQKLGPWRRPVAYLSKKLDPVAAGWPPCLRMVAAIAVLTKDAGKLTMGQPLVILAPHAVEALVKQPPDRWLSNARMTHYQAMLLDTDRVQFGPVVALNPATLLPLPEEGAPHDCLEILAETHGTRPDLTDQPIPDADHTWYTDGSSFLQEGQRKAGAAVTTETEVIWAGALPAGTSAQRAELIALTQALKMAEGKRLNVYTDSRYAFATAHIHGEIYRRRGWLTSEGREIKNKSEILALLKALFLPKRLSIIHCLGHQKGDSAEARGNRLADQAAREAAIKTPPDTSTLLAGKRTADGSEFEKRTADGSEFESPKKKAKVE

SEQ ID NO: 7034 - protein, 2094 aa, synthetic construct
MPAAKRVKLDGGDKKYSIGLDIGTNSVGWAVITDEYKVPSKKFKVLGNTDRHSIKKNLIGALLFDSGETAEATRLKRTARRRYTRRKNRICYLQEIFSNEMAKVDDSFFHRLEESFLVEEDKKHERHPIFGNIVDEVAYHEKYPTIYHLRKKLVDSTDKADLRLIYLALAHMIKFRGHFLIEGDLNPDNSDVDKLFIQLVQTYNQLFEENPINASGVDAKAILSARLSKSRRLENLIAQLPGEKKNGLFGNLIALSLGLTPNFKSNFDLAEDAKLQLSKDTYDDDLDNLLAQIGDQYADLFLAAKNLSDAILLSDILRVNTEITKAPLSASMIKRYDEHHQDLTLLKALVRQQLPEKYKEIFFDQSKNGYAGYIDGGASQEEFYKFIKPILEKMDGTEELLVKLNREDLLRKQRTFDNGSIPHQIHLGELHAILRRQEDFYPFLKDNREKIEKILTFRIPYYVGPLARGNSRFAWMTRKSEETITPWNFEEVVDKGASAQSFIERMTNFDKNLPNEKVLPKHSLLYEYFTVYNELTKVKYVTEGMRKPAFLSGEQKKAIVDLLFKTNRKVTVKQLKEDYFKKIECFDSVEISGVEDRFNASLGTYHDLLKIIKDKDFLDNEENEDILEDIVLTLTLFEDREMIEERLKTYAHLFDDKVMKQLKRRRYTGWGRLSRKLINGIRDKQSGKTILDFLKSDGFANRNFMQLIHDDSLTFKEDIQKAQVSGQGDSLHEHIANLAGSPAIKKGILQTVKVVDELVKVMGRHKPENIVIEMARENQTTQKGQKNSRERMKRIEEGIKELGSQILKEHPVENTQLQNEKLYLYYLQNGRDMYVDQELDINRLSDYDVDHIVPQSFLKDDSIDNKVLTRSDKARGKSDNVPSEEVVKKMKNYWRQLLNAKLITQRKFDNLTKAERGGLSELDKAGFIKRQLVETRQITKHVAQILDSRMNTKYDENDKLIREVKVITLKSKLVSDFRKDFQFYKVREINNYHHAHDAYLNAVVGTALIKKYPKLESEFVYGDYKVYDVRKMIAKSEQEIGKATAKYFFYSNIMNFFKTEITLANGEIRKRPLIETNGETGEIVWDKGRDFATVRKVLSMPQVNIVKKTEVQTGGFSKESILPKRNSDKLIARKKDWDPKKYGGFDSPTVAYSVLVVAKVEKGKSKKLKSVKELLGITIMERSSFEKNPIDFLEAKGYKEVKKDLIIKLPKYSLFELENGRKRMLASAGELQKGNELALPSKYVNFLYLASHYEKLKGSPEDNEQKQLFVEQHKHYLDEIIEQISEFSKRVILADANLDKVLSAYNKHRDKPIREQAENIIHLFTLTNLGAPAAFKYFDTTIDRKRYTSTKEVLDATLIHQSITGLYETRIDLSQLGGDGGPAPGGGGGSGGTLNIEDEYRLHETSKEPDVSLGSTWLSDFPQAWAETGGMGLAVRQAPLIIPLKATSTPVSIKQYPMSQEARLGIKPHIQRLLDQGILVPCQSPWNTPLLPVKKPGTNDYRPVQDLREVNKRVEDIHPTVPNPYNLLSGLPPSHQWYTVLDLKDAFFCLRLHPTSQPLFAFEWRDPEMGISGQLTWTRLPQGFKNSPTLFNEALHRDLAGFRIQHPDLILLQYVDDLLLAATSELDCQQGTRALLQTLGDLGYRASAKKAQICQKQVKYLGYLLKEGQRWLTEARKETVMGQPIPKTPRQLREFLGTAGFCRLWIPGFAEMAAPLYPLTKPGTLFNWGPDQQKAFQEIKQALLTAPALGLPDLTKPFELFVDEKQGYAKGVLTQKLGPWRRPVAYLSKKLDPVAAGWPPCLRMVAAIAVLTKDAGKLTMGQPLVILAPHAVEALVKQPPDRWLSNARMTHYQALLLDTDRVQFGPVVALNPATLLPLPEEGLQHDCLDILAEAHGTRSDLMDQPLPDADHTWYTDGSSFLQEGQRKAGAAVTTETEVIWARALPAGTSAQRAELIALTQALKMAEGKKLNVYTDSRYAFATAHIHGEIYRRRGWLTSEGKEIKNKDEILALLKALFLPKRLSIIHCPGHQKGNSAEARGNRMADQAAREVATRETPETSTLLAGKRTADGSEFEKRTADGSEFESPKKKAKVE

SEQ ID NO: 7035 - protein, 2094 aa, synthetic construct
MPAAKRVKLDGGDKKYSIGLDIGTNSVGWAVITDEYKVPSKKFKVLGNTDRHSIKKNLIGALLFDSGETAEATRLKRTARRRYTRRKNRICYLQEIFSNEMAKVDDSFFHRLEESFLVEEDKKHERHPIFGNIVDEVAYHEKYPTIYHLRKKLVDSTDKADLRLIYLALAHMIKFRGHFLIEGDLNPDNSDVDKLFIQLVQTYNQLFEENPINASGVDAKAILSARLSKSRRLENLIAQLPGEKKNGLFGNLIALSLGLTPNFKSNFDLAEDAKLQLSKDTYDDDLDNLLAQIGDQYADLFLAAKNLSDAILLSDILRVNTEITKAPLSASMIKRYDEHHQDLTLLKALVRQQLPEKYKEIFFDQSKNGYAGYIDGGASQEEFYKFIKPILEKMDGTEELLVKLNREDLLRKQRTFDNGSIPHQIHLGELHAILRRQEDFYPFLKDNREKIEKILTFRIPYYVGPLARGNSRFAWMTRKSEETITPWNFEEVVDKGASAQSFIERMTNFDKNLPNEKVLPKHSLLYEYFTVYNELTKVKYVTEGMRKPAFLSGEQKKAIVDLLFKTNRKVTVKQLKEDYFKKIECFDSVEISGVEDRFNASLGTYHDLLKIIKDKDFLDNEENEDILEDIVLTLTLFEDREMIEERLKTYAHLFDDKVMKQLKRRRYTGWGRLSRKLINGIRDKQSGKTILDFLKSDGFANRNFMQLIHDDSLTFKEDIQKAQVSGQGDSLHEHIANLAGSPAIKKGILQTVKVVDELVKVMGRHKPENIVIEMARENQTTQKGQKNSRERMKRIEEGIKELGSQILKEHPVENTQLQNEKLYLYYLQNGRDMYVDQELDINRLSDYDVDHIVPQSFLKDDSIDNKVLTRSDKARGKSDNVPSEEVVKKMKNYWRQLLNAKLITQRKFDNLTKAERGGLSELDKAGFIKRQLVETRQITKHVAQILDSRMNTKYDENDKLIREVKVITLKSKLVSDFRKDFQFYKVREINNYHHAHDAYLNAVVGTALIKKYPKLESEFVYGDYKVYDVRKMIAKSEQEIGKATAKYFFYSNIMNFFKTEITLANGEIRKRPLIETNGETGEIVWDKGRDFATVRKVLSMPQVNIVKKTEVQTGGFSKESILPKRNSDKLIARKKDWDPKKYGGFDSPTVAYSVLVVAKVEKGKSKKLKSVKELLGITIMERSSFEKNPIDFLEAKGYKEVKKDLIIKLPKYSLFELENGRKRMLASAGELQKGNELALPSKYVNFLYLASHYEKLKGSPEDNEQKQLFVEQHKHYLDEIIEQISEFSKRVILADANLDKVLSAYNKHRDKPIREQAENIIHLFTLTNLGAPAAFKYFDTTIDRKRYTSTKEVLDATLIHQSITGLYETRIDLSQLGGDGGPAPGGGGGSGGTLNIEDEYRLHETSKGPDVPLGSTWLSDFPQAWAETGGMGLAVRQAPLIIPLKATSTPVSIKQYPMSQEARLGIKPHIQRLLDQGILVPCQSPWNTPLLPVKKPGTNDYRPVQDLREVNKRVEDIHPTVPNPYNLLSGLPPSHQWYTVLDLKDAFFCLRLHPTSQSLFAFEWRDPEMGISGQLTWTRLPQGFKNSPTLFNEALHRDLADFRIQHPDLILLQYVDDLLLAATSELDCQQGTRALLQTLGDLGYRASAKKAQICQKQVKYLGYLLKEGQRWLTEARKETVMGQPTPKTPRQLREFLGKAGFCRLFIPGFAEMAAPLYPLTKPGTLFEWGPDQQKAYQEIKQALLTAPALGLPDLTKPFELFVDEKQGYAKGVLTQKLGPWRRPVAYLSKKLDPVAAGWPPCLRMVAAIAVLTKDAGKLTMGQPLVILAPHAVEALVKQPPDRWLSNARMTHYQALLLDTDRVQFGPIVALNPATLLPLPEEGLQHDCLDILAEAHGTRPDLTDQPLPDADHTWYTDGSSFLQEGQRKAGAAVTTETEVVWAKALPAGTSAQRAELIALTQALKMAEGKKLNVYTDSRYAFATAHIHGEIYRRRGWLTSEGKEIKNKDEILALLKALFLPKRLSIIHCPGHQKGNRAEARGNRMADQAAREVATRETPETSTLLAGKRTADGSEFEKRTADGSEFESPKKKAKVE

SEQ ID NO: 7036 - protein, 2094 aa, synthetic construct; identical to SEQ ID NO: 4521

SEQ ID NO: 7037 - protein, 2094 aa, synthetic construct
MPAAKRVKLDGGDKKYSIGLDIGTNSVGWAVITDEYKVPSKKFKVLGNTDRHSIKKNLIGALLFDSGETAEATRLKRTARRRYTRRKNRICYLQEIFSNEMAKVDDSFFHRLEESFLVEEDKKHERHPIFGNIVDEVAYHEKYPTIYHLRKKLVDSTDKADLRLIYLALAHMIKFRGHFLIEGDLNPDNSDVDKLFIQLVQTYNQLFEENPINASGVDAKAILSARLSKSRRLENLIAQLPGEKKNGLFGNLIALSLGLTPNFKSNFDLAEDAKLQLSKDTYDDDLDNLLAQIGDQYADLFLAAKNLSDAILLSDILRVNTEITKAPLSASMIKRYDEHHQDLTLLKALVRQQLPEKYKEIFFDQSKNGYAGYIDGGASQEEFYKFIKPILEKMDGTEELLVKLNREDLLRKQRTFDNGSIPHQIHLGELHAILRRQEDFYPFLKDNREKIEKILTFRIPYYVGPLARGNSRFAWMTRKSEETITPWNFEEVVDKGASAQSFIERMTNFDKNLPNEKVLPKHSLLYEYFTVYNELTKVKYVTEGMRKPAFLSGEQKKAIVDLLFKTNRKVTVKQLKEDYFKKIECFDSVEISGVEDRFNASLGTYHDLLKIIKDKDFLDNEENEDILEDIVLTLTLFEDREMIEERLKTYAHLFDDKVMKQLKRRRYTGWGRLSRKLINGIRDKQSGKTILDFLKSDGFANRNFMQLIHDDSLTFKEDIQKAQVSGQGDSLHEHIANLAGSPAIKKGILQTVKVVDELVKVMGRHKPENIVIEMARENQTTQKGQKNSRERMKRIEEGIKELGSQILKEHPVENTQLQNEKLYLYYLQNGRDMYVDQELDINRLSDYDVDHIVPQSFLKDDSIDNKVLTRSDKARGKSDNVPSEEVVKKMKNYWRQLLNAKLITQRKFDNLTKAERGGLSELDKAGFIKRQLVETRQITKHVAQILDSRMNTKYDENDKLIREVKVITLKSKLVSDFRKDFQFYKVREINNYHHAHDAYLNAVVGTALIKKYPKLESEFVYGDYKVYDVRKMIAKSEQEIGKATAKYFFYSNIMNFFKTEITLANGEIRKRPLIETNGETGEIVWDKGRDFATVRKVLSMPQVNIVKKTEVQTGGFSKESILPKRNSDKLIARKKDWDPKKYGGFDSPTVAYSVLVVAKVEKGKSKKLKSVKELLGITIMERSSFEKNPIDFLEAKGYKEVKKDLIIKLPKYSLFELENGRKRMLASAGELQKGNELALPSKYVNFLYLASHYEKLKGSPEDNEQKQLFVEQHKHYLDEIIEQISEFSKRVILADANLDKVLSAYNKHRDKPIREQAENIIHLFTLTNLGAPAAFKYFDTTIDRKRYTSTKEVLDATLIHQSITGLYETRIDLSQLGGDGGPAPGGGGGSGGTLNIEDEHRLHETSKEPDVSLGSTWLSDFPQAWAETGGMGLAVRQAPLIIPLKATSTPVSIKQYPMSQEARLGIKPHIQRLLDQGILVPCQSPWNTPLLPVKKPGTNDYRPVQDLREVNKRVEDIHPTVPNPYNLLSGLPPSHQWYTVLDLKDAFFCLRLHPTSQPLFAFEWRDPEMGISGQLTWTRLPQGFKNSPTLFDEALHRDLADFRIQHPDLILLQYVDDLLLAATSELDCQQGTRALLQTLGNLGYRASAKKAQICQKQVKYLGYLLKEGQRWLTEARKETVMGQPTPKTPRQLREFLGTAGFCRLWIPGFAEMAAPLYPLTKTGTLFNWGPDQQKAYQEIKQALLTAPALGLPDLTKPFELFVDEKQGYAKGVLTQKLGPWRRPVAYLSKKLDPVAAGWPPCLRMVAAIAVLTKDAGKLTMGQPLVILAPHAVEALVKQPPDRWLSNARMTHYQALLLDTDRVQFGPVVALNPATLLPLPEEGLQHNCLDILAEAHGTRPDLTDQPLPDADHTWYTDGSSLLQEGQRKAGAAVTTETEVIWAKALPAGTSAQRAELIALTQALKMAEGKKLNVYTDSRYAFATAHIHGEIYRRRGLLTSEGKEIKNKDEILALLKALFLPKRLSIIHCPGHQKGHSAEARGNRMADQAARKAAITETPDTSTLLAGKRTADGSEFEKRTADGSEFESPKKKAKVE

SEQ ID NO: 7038 - protein, 2094 aa, synthetic construct; identical to SEQ ID NO: 4521

SEQ ID NO: 7039 - protein, 2022 aa, synthetic construct
MPAAKRVKLDGGDKKYSIGLDIGTNSVGWAVITDEYKVPSKKFKVLGNTDRHSIKKNLIGALLFDSGETAEATRLKRTARRRYTRRKNRICYLQEIFSNEMAKVDDSFFHRLEESFLVEEDKKHERHPIFGNIVDEVAYHEKYPTIYHLRKKLVDSTDKADLRLIYLALAHMIKFRGHFLIEGDLNPDNSDVDKLFIQLVQTYNQLFEENPINASGVDAKAILSARLSKSRRLENLIAQLPGEKKNGLFGNLIALSLGLTPNFKSNFDLAEDAKLQLSKDTYDDDLDNLLAQIGDQYADLFLAAKNLSDAILLSDILRVNTEITKAPLSASMIKRYDEHHQDLTLLKALVRQQLPEKYKEIFFDQSKNGYAGYIDGGASQEEFYKFIKPILEKMDGTEELLVKLNREDLLRKQRTFDNGSIPHQIHLGELHAILRRQEDFYPFLKDNREKIEKILTFRIPYYVGPLARGNSRFAWMTRKSEETITPWNFEEVVDKGASAQSFIERMTNFDKNLPNEKVLPKHSLLYEYFTVYNELTKVKYVTEGMRKPAFLSGEQKKAIVDLLFKTNRKVTVKQLKEDYFKKIECFDSVEISGVEDRFNASLGTYHDLLKIIKDKDFLDNEENEDILEDIVLTLTLFEDREMIEERLKTYAHLFDDKVMKQLKRRRYTGWGRLSRKLINGIRDKQSGKTILDFLKSDGFANRNFMQLIHDDSLTFKEDIQKAQVSGQGDSLHEHIANLAGSPAIKKGILQTVKVVDELVKVMGRHKPENIVIEMARENQTTQKGQKNSRERMKRIEEGIKELGSQILKEHPVENTQLQNEKLYLYYLQNGRDMYVDQELDINRLSDYDVDHIVPQSFLKDDSIDNKVLTRSDKARGKSDNVPSEEVVKKMKNYWRQLLNAKLITQRKFDNLTKAERGGLSELDKAGFIKRQLVETRQITKHVAQILDSRMNTKYDENDKLIREVKVITLKSKLVSDFRKDFQFYKVREINNYHHAHDAYLNAVVGTALIKKYPKLESEFVYGDYKVYDVRKMIAKSEQEIGKATAKYFFYSNIMNFFKTEITLANGEIRKRPLIETNGETGEIVWDKGRDFATVRKVLSMPQVNIVKKTEVQTGGFSKESILPKRNSDKLIARKKDWDPKKYGGFDSPTVAYSVLVVAKVEKGKSKKLKSVKELLGITIMERSSFEKNPIDFLEAKGYKEVKKDLIIKLPKYSLFELENGRKRMLASAGELQKGNELALPSKYVNFLYLASHYEKLKGSPEDNEQKQLFVEQHKHYLDEIIEQISEFSKRVILADANLDKVLSAYNKHRDKPIREQAENIIHLFTLTNLGAPAAFKYFDTTIDRKRYTSTKEVLDATLIHQSITGLYETRIDLSQLGGDGGPAPGGGGGSGGGRDIMKDIKVRLMTDSPDDSQDLMIGAIESNLFADQISWKSDQPVWLNQWPLKQEKLQALQQLVTEQLQLGHLEESNSPWNTPVFVIKKKSGKWRLLQDLRAVNATMHDMGALQPGLPSPVAPPKGWEIIIIDLQDCFFNIKLHPEDCKRFAFSVPSPNFKRPYQRFQWKVLPQGMKNSPTLCQKFVDKAILTVRDKYQDSYIVHYMDDILLAHPSRSIVDEILTSMIQALNKHGLVVSTEKIQKYDNLKYLGTHIQGDSVSYQKLQIRTDKLRTLNDFQKLLGNINWIRPFLKLTTGELKPLFEILNPDSNPISTRKLTPEACKALQLMNERLSTARVKRLDLSQPWSLCILKTEYTPTACLWQDGVVEWIHLPHISPKVITPYDIFCTQLIIKGRHRSKELFSKDPDYIVVPYTKVQFDLLLQEKEDWPISLLGFLGEVHFHLPKDPLLTFTLQTAIIFPHMTSTTPLEKGIVIFTDGSANGRSVTYIQGREPIIKENTQNTAQQAEIVAVITAFEEVSQPFNLYTDSKYVTGLFPEIETATLSPRTKIYTELKHLQRLIHKRQEKFYIGHIRGHTGLPGPLAQGNAYADSLTRILTAGKRTADGSEFEKRTADGSEFESPKKKAKVE

SEQ ID NO: 7040 - protein, 2086 aa, synthetic construct
MPAAKRVKLDGGDKKYSIGLDIGTNSVGWAVITDEYKVPSKKFKVLGNTDRHSIKKNLIGALLFDSGETAEATRLKRTARRRYTRRKNRICYLQEIFSNEMAKVDDSFFHRLEESFLVEEDKKHERHPIFGNIVDEVAYHEKYPTIYHLRKKLVDSTDKADLRLIYLALAHMIKFRGHFLIEGDLNPDNSDVDKLFIQLVQTYNQLFEENPINASGVDAKAILSARLSKSRRLENLIAQLPGEKKNGLFGNLIALSLGLTPNFKSNFDLAEDAKLQLSKDTYDDDLDNLLAQIGDQYADLFLAAKNLSDAILLSDILRVNTEITKAPLSASMIKRYDEHHQDLTLLKALVRQQLPEKYKEIFFDQSKNGYAGYIDGGASQEEFYKFIKPILEKMDGTEELLVKLNREDLLRKQRTFDNGSIPHQIHLGELHAILRRQEDFYPFLKDNREKIEKILTFRIPYYVGPLARGNSRFAWMTRKSEETITPWNFEEVVDKGASAQSFIERMTNFDKNLPNEKVLPKHSLLYEYFTVYNELTKVKYVTEGMRKPAFLSGEQKKAIVDLLFKTNRKVTVKQLKEDYFKKIECFDSVEISGVEDRFNASLGTYHDLLKIIKDKDFLDNEENEDILEDIVLTLTLFEDREMIEERLKTYAHLFDDKVMKQLKRRRYTGWGRLSRKLINGIRDKQSGKTILDFLKSDGFANRNFMQLIHDDSLTFKEDIQKAQVSGQGDSLHEHIANLAGSPAIKKGILQTVKVVDELVKVMGRHKPENIVIEMARENQTTQKGQKNSRERMKRIEEGIKELGSQILKEHPVENTQLQNEKLYLYYLQNGRDMYVDQELDINRLSDYDVDHIVPQSFLKDDSIDNKVLTRSDKARGKSDNVPSEEVVKKMKNYWRQLLNAKLITQRKFDNLTKAERGGLSELDKAGFIKRQLVETRQITKHVAQILDSRMNTKYDENDKLIREVKVITLKSKLVSDFRKDFQFYKVREINNYHHAHDAYLNAVVGTALIKKYPKLESEFVYGDYKVYDVRKMIAKSEQEIGKATAKYFFYSNIMNFFKTEITLANGEIRKRPLIETNGETGEIVWDKGRDFATVRKVLSMPQVNIVKKTEVQTGGFSKESILPKRNSDKLIARKKDWDPKKYGGFDSPTVAYSVLVVAKVEKGKSKKLKSVKELLGITIMERSSFEKNPIDFLEAKGYKEVKKDLIIKLPKYSLFELENGRKRMLASAGELQKGNELALPSKYVNFLYLASHYEKLKGSPEDNEQKQLFVEQHKHYLDEIIEQISEFSKRVILADANLDKVLSAYNKHRDKPIREQAENIIHLFTLTNLGAPAAFKYFDTTIDRKRYTSTKEVLDATLIHQSITGLYETRIDLSQLGGDGGPAPGGGGGSGGLDDEYRLYSPLVKPDQNIQFWLEQFPQAWAETAGMGLAKQVPPQVIQLKASATPVSVRQYPLSKEAQEGIRPHVQRLIQQGILVPVQSPWNTPLLPVRKPGTNDYRPVQDLREVNKRVQDIHPTVPNPYNLLCALPPQRSWYTVLDLKDAFFCLRLHPTSQPLFAFEWRDPGTGRTGQLTWTRLPQGFKNSPTIFNEALHRDLANFRIQHPQVTLLQYVDDLLLAGATKQDCLEGTKALLLELSDLGYRASAKKAQICRREVTYLGYSLRDGQRWLTEARKKTVVQIPAPTTAKQVREFLGKAGFCRLFIPGFATLAAPLYPLTKPKGEFSWAPEHQKAFDAIKKALLSAPALALPDVTKPFTLYVDERKGVARGVLTQTLGPWRRPVAYLSKKLDPVASGWPVCLKAIAAVAILVKDADKLTLGQNITVIAPHALENIVRQPPDRWMTNARMTHYQSLLLTERVTFAPPAALNPATLLPEETDEPVTHDCHQLLIEETGVRKDLTDIPLTGEVLTWFTDGSSYVVEGKRMAGAAVVDGTRTIWASSLPEGTSAQKAELMALTQALRLAEGKSINIYTDSRYAFATAHVHGAIYKQRGWLTSAGREIKNKEEILSLLEALHLPKRLAIIHCPGHQKAKDPISRGNQMADRVAKQAAQGVNLLPAGKRTADGSEFEKRTADGSEFESPKKKAKVE

SEQ ID NO: 7041 - protein, 2174 aa, synthetic construct
MPAAKRVKLDGGDKKYSIGLDIGTNSVGWAVITDEYKVPSKKFKVLGNTDRHSIKKNLIGALLFDSGETAEATRLKRTARRRYTRRKNRICYLQEIFSNEMAKVDDSFFHRLEESFLVEEDKKHERHPIFGNIVDEVAYHEKYPTIYHLRKKLVDSTDKADLRLIYLALAHMIKFRGHFLIEGDLNPDNSDVDKLFIQLVQTYNQLFEENPINASGVDAKAILSARLSKSRRLENLIAQLPGEKKNGLFGNLIALSLGLTPNFKSNFDLAEDAKLQLSKDTYDDDLDNLLAQIGDQYADLFLAAKNLSDAILLSDILRVNTEITKAPLSASMIKRYDEHHQDLTLLKALVRQQLPEKYKEIFFDQSKNGYAGYIDGGASQEEFYKFIKPILEKMDGTEELLVKLNREDLLRKQRTFDNGSIPHQIHLGELHAILRRQEDFYPFLKDNREKIEKILTFRIPYYVGPLARGNSRFAWMTRKSEETITPWNFEEVVDKGASAQSFIERMTNFDKNLPNEKVLPKHSLLYEYFTVYNELTKVKYVTEGMRKPAFLSGEQKKAIVDLLFKTNRKVTVKQLKEDYFKKIECFDSVEISGVEDRFNASLGTYHDLLKIIKDKDFLDNEENEDILEDIVLTLTLFEDREMIEERLKTYAHLFDDKVMKQLKRRRYTGWGRLSRKLINGIRDKQSGKTILDFLKSDGFANRNFMQLIHDDSLTFKEDIQKAQVSGQGDSLHEHIANLAGSPAIKKGILQTVKVVDELVKVMGRHKPENIVIEMARENQTTQKGQKNSRERMKRIEEGIKELGSQILKEHPVENTQLQNEKLYLYYLQNGRDMYVDQELDINRLSDYDVDHIVPQSFLKDDSIDNKVLTRSDKARGKSDNVPSEEVVKKMKNYWRQLLNAKLITQRKFDNLTKAERGGLSELDKAGFIKRQLVETRQITKHVAQILDSRMNTKYDENDKLIREVKVITLKSKLVSDFRKDFQFYKVREINNYHHAHDAYLNAVVGTALIKKYPKLESEFVYGDYKVYDVRKMIAKSEQEIGKATAKYFFYSNIMNFFKTEITLANGEIRKRPLIETNGETGEIVWDKGRDFATVRKVLSMPQVNIVKKTEVQTGGFSKESILPKRNSDKLIARKKDWDPKKYGGFDSPTVAYSVLVVAKVEKGKSKKLKSVKELLGITIMERSSFEKNPIDFLEAKGYKEVKKDLIIKLPKYSLFELENGRKRMLASAGELQKGNELALPSKYVNFLYLASHYEKLKGSPEDNEQKQLFVEQHKHYLDEIIEQISEFSKRVILADANLDKVLSAYNKHRDKPIREQAENIIHLFTLTNLGAPAAFKYFDTTIDRKRYTSTKEVLDATLIHQSITGLYETRIDLSQLGGDGGPAPGGGGGSGGMDPLQLLQPLEAEIKGTKLKAHWNSGATITCVPEAFLEDERPIQTMLIKTIHGEKQQDVYYLTFKVQGRKVEAEVLASPYDYILLNPSDVPWLMKKPLQLTVLVPLHEYQERLLQQTALPKEQKELLQKLFLKYDALWQHWENQVGHRRIKPHNIATGTLAPRPQKQYPINPKAKPSIQIVIDDLLKQGVLIQQNSTMNTPVYPVPKPDGKWRMVLDYREVNKTIPLIAAQNQHSAGILSSIYRGKYKTTLDLTNGFWAHPITPESYWLTAFTWQGKQYCWTRLPQGFLNSPALFTADVVDLLKEIPNVQAYVDDIYISHDDPQEHLEQLEKIFSILLNAGYVVSLKKSEIAQREVEFLGFNITKEGRGLTDTFKQKLLNITPPKDLKQLQSILGLLNFARNFIPNYSELVKPLYTIVANANGKFISWTEDNSNQLQHIISVLNQADNLEERNPETRLIIKVNSSPSAGYIRYYNEGSKRPIMYVNYIFSKAEAKFTQTEKLLTTMHKGLIKAMDLAMGQEILVYSPIVSMTKIQRTPLPERKALPVRWITWMTYLEDPRIQFHYDKSLPELQQIPNVTEDVIAKTKHPSEFAMVFYTDGSAIKHPDVNKSHSAGMGIAQVQFIPEYKIVHQWSIPLGDHTAQLAEIAAVEFACKKALKISGPVLIVTDSFYVAESANKELPYWKSNGFLNNKKKPLRHVSKWKSIAECLQLKPDIIIMHEKGHQQPMTTLHTEGNNLADKLATQGSYVVHAGKRTADGSEFEKRTADGSEFESPKKKAKVE

SEQ ID NO: 7042 - protein, 2092 aa, synthetic construct
MPAAKRVKLDGGDKKYSIGLDIGTNSVGWAVITDEYKVPSKKFKVLGNTDRHSIKKNLIGALLFDSGETAEATRLKRTARRRYTRRKNRICYLQEIFSNEMAKVDDSFFHRLEESFLVEEDKKHERHPIFGNIVDEVAYHEKYPTIYHLRKKLVDSTDKADLRLIYLALAHMIKFRGHFLIEGDLNPDNSDVDKLFIQLVQTYNQLFEENPINASGVDAKAILSARLSKSRRLENLIAQLPGEKKNGLFGNLIALSLGLTPNFKSNFDLAEDAKLQLSKDTYDDDLDNLLAQIGDQYADLFLAAKNLSDAILLSDILRVNTEITKAPLSASMIKRYDEHHQDLTLLKALVRQQLPEKYKEIFFDQSKNGYAGYIDGGASQEEFYKFIKPILEKMDGTEELLVKLNREDLLRKQRTFDNGSIPHQIHLGELHAILRRQEDFYPFLKDNREKIEKILTFRIPYYVGPLARGNSRFAWMTRKSEETITPWNFEEVVDKGASAQSFIERMTNFDKNLPNEKVLPKHSLLYEYFTVYNELTKVKYVTEGMRKPAFLSGEQKKAIVDLLFKTNRKVTVKQLKEDYFKKIECFDSVEISGVEDRFNASLGTYHDLLKIIKDKDFLDNEENEDILEDIVLTLTLFEDREMIEERLKTYAHLFDDKVMKQLKRRRYTGWGRLSRKLINGIRDKQSGKTILDFLKSDGFANRNFMQLIHDDSLTFKEDIQKAQVSGQGDSLHEHIANLAGSPAIKKGILQTVKVVDELVKVMGRHKPENIVIEMARENQTTQKGQKNSRERMKRIEEGIKELGSQILKEHPVENTQLQNEKLYLYYLQNGRDMYVDQELDINRLSDYDVDHIVPQSFLKDDSIDNKVLTRSDKARGKSDNVPSEEVVKKMKNYWRQLLNAKLITQRKFDNLTKAERGGLSELDKAGFIKRQLVETRQITKHVAQILDSRMNTKYDENDKLIREVKVITLKSKLVSDFRKDFQFYKVREINNYHHAHDAYLNAVVGTALIKKYPKLESEFVYGDYKVYDVRKMIAKSEQEIGKATAKYFFYSNIMNFFKTEITLANGEIRKRPLIETNGETGEIVWDKGRDFATVRKVLSMPQVNIVKKTEVQTGGFSKESILPKRNSDKLIARKKDWDPKKYGGFDSPTVAYSVLVVAKVEKGKSKKLKSVKELLGITIMERSSFEKNPIDFLEAKGYKEVKKDLIIKLPKYSLFELENGRKRMLASAGELQKGNELALPSKYVNFLYLASHYEKLKGSPEDNEQKQLFVEQHKHYLDEIIEQISEFSKRVILADANLDKVLSAYNKHRDKPIREQAENIIHLFTLTNLGAPAAFKYFDTTIDRKRYTSTKEVLDATLIHQSITGLYETRIDLSQLGGDGGPAPGGGGGSGGVLNLEEEYRLHEKPVPSSIDPSWLQLFPTVWAERAGMGLANQVPPVVVELRSGASPVAVRQYPMSKEAREGIRPHIQRFLDLGVLVPCQSPWNTPLLPVKKPGTNDYRPVQDLREINKRVQDIHPTVPNPYNLLSSLPPSHTWYSVLDLKDAFFCLKLHPNSQPLFAFEWRDPEKGNTGQLTWTRLPQGFKNSPTLFDEALHRDLAPFRALNPQVVLLQYVDDLLVAAPTYRDCKEGTQKLLQELSKLGYRVSAKKAQLCQKEVTYLGYLLKEGKRWLTPARKATVMKIPPPTTPRQVREFLGTAGFCRLWIPGFASLAAPLYPLTKESIPFIWTEEHQKAFDRIKEALLSAPALALPDLTKPFTLYVDERAGVARGVLTQTLGPWRRPVAYLSKKLDPVASGWPTCLKAVAAVALLLKDADKLTLGQNVTVIASHSLESIVRQPPDRWMTNARMTHYQSLLLNERVSFAPPAVLNPATLLPVESEATPVHRCSEILAEETGTRRDLKDQPLPGVPAWYTDGSSFIAEGKRRAGAAIVDGKRTVWASSLPEGTSAQKAELVALTQALRLAEGKDINIYTDSRYAFATAHIHGAIYKQRGLLTSAGKDIKNKEEILALLEAIHLPKRVAIIHCPGHQKGNDPVATGNRRADEAAKQAALSTRVLAETTKPAGKRTADGSEFEKRTADGSEFESPKKKAKVE

SEQ ID NO: 7043 - protein, 2092 aa, synthetic construct
MPAAKRVKLDGGDKKYSIGLDIGTNSVGWAVITDEYKVPSKKFKVLGNTDRHSIKKNLIGALLFDSGETAEATRLKRTARRRYTRRKNRICYLQEIFSNEMAKVDDSFFHRLEESFLVEEDKKHERHPIFGNIVDEVAYHEKYPTIYHLRKKLVDSTDKADLRLIYLALAHMIKFRGHFLIEGDLNPDNSDVDKLFIQLVQTYNQLFEENPINASGVDAKAILSARLSKSRRLENLIAQLPGEKKNGLFGNLIALSLGLTPNFKSNFDLAEDAKLQLSKDTYDDDLDNLLAQIGDQYADLFLAAKNLSDAILLSDILRVNTEITKAPLSASMIKRYDEHHQDLTLLKALVRQQLPEKYKEIFFDQSKNGYAGYIDGGASQEEFYKFIKPILEKMDGTEELLVKLNREDLLRKQRTFDNGSIPHQIHLGELHAILRRQEDFYPFLKDNREKIEKILTFRIPYYVGPLARGNSRFAWMTRKSEETITPWNFEEVVDKGASAQSFIERMTNFDKNLPNEKVLPKHSLLYEYFTVYNELTKVKYVTEGMRKPAFLSGEQKKAIVDLLFKTNRKVTVKQLKEDYFKKIECFDSVEISGVEDRFNASLGTYHDLLKIIKDKDFLDNEENEDILEDIVLTLTLFEDREMIEERLKTYAHLFDDKVMKQLKRRRYTGWGRLSRKLINGIRDKQSGKTILDFLKSDGFANRNFMQLIHDDSLTFKEDIQKAQVSGQGDSLHEHIANLAGSPAIKKGILQTVKVVDELVKVMGRHKPENIVIEMARENQTTQKGQKNSRERMKRIEEGIKELGSQILKEHPVENTQLQNEKLYLYYLQNGRDMYVDQELDINRLSDYDVDHIVPQSFLKDDSIDNKVLTRSDKARGKSDNVPSEEVVKKMKNYWRQLLNAKLITQRKFDNLTKAERGGLSELDKAGFIKRQLVETRQITKHVAQILDSRMNTKYDENDKLIREVKVITLKSKLVSDFRKDFQFYKVREINNYHHAHDAYLNAVVGTALIKKYPKLESEFVYGDYKVYDVRKMIAKSEQEIGKATAKYFFYSNIMNFFKTEITLANGEIRKRPLIETNGETGEIVWDKGRDFATVRKVLSMPQVNIVKKTEVQTGGFSKESILPKRNSDKLIARKKDWDPKKYGGFDSPTVAYSVLVVAKVEKGKSKKLKSVKELLGITIMERSSFEKNPIDFLEAKGYKEVKKDLIIKLPKYSLFELENGRKRMLASAGELQKGNELALPSKYVNFLYLASHYEKLKGSPEDNEQKQLFVEQHKHYLDEIIEQISEFSKRVILADANLDKVLSAYNKHRDKPIREQAENIIHLFTLTNLGAPAAFKYFDTTIDRKRYTSTKEVLDATLIHQSITGLYETRIDLSQLGGDGGPAPGGGGGSGGVLNLEEEYRLHEKPVPSSIDPSWLQLFPTVWAERAGMGLANQVPPVVVELRSGASPVAVRQYPMSKEAREGIRPHIQRFLDLGVLVPCQSPWNTPLLPVKKPGTNDYRPVQDLREINKRVQDIHPTVPNPYNLLSSLPPSHTWYSVLDLKDAFFCLKLHPNSQPLFAFEWRDPEKGNTGQLTWTRLPQGFKNSPTLFNEALHRDLAPFRALNPQVVLLQYVDDLLVAAPTYRDCKEGTQKLLQELSKLGYRVSAKKAQLCQKEVTYLGYLLKEGKRWLTPARKATVMKIPPPTTPRQVREFLGKAGFCRLFIPGFASLAAPLYPLTKPSIPFIWTEEHQKAFDRIKEALLSAPALALPDLTKPFTLYVDERAGVARGVLTQTLGPWRRPVAYLSKKLDPVASGWPTCLKAVAAVALLLKDADKLTLGQNVTVIASHSLESIVRQPPDRWMTNARMTHYQSLLLNERVSFAPPAVLNPATLLPVESEATPVHRCSEILAEETGTRRDLKDQPLPGVPAWYTDGSSFIAEGKRRAGAAIVDGKRTVWASSLPEGTSAQKAELVALTQALRLAEGKDINIYTDSRYAFATAHIHGAIYKQRGWLTSAGKDIKNKEEILALLEAIHLPKRVAIIHCPGHQKGNDPVATGNRRADEAAKQAALSTRVLAETTKPAGKRTADGSEFEKRTADGSEFESPKKKAKVE

SEQ ID NO: 7044 - protein, 2094 aa, synthetic construct
MPAAKRVKLDGGDKKYSIGLDIGTNSVGWAVITDEYKVPSKKFKVLGNTDRHSIKKNLIGALLFDSGETAEATRLKRTARRRYTRRKNRICYLQEIFSNEMAKVDDSFFHRLEESFLVEEDKKHERHPIFGNIVDEVAYHEKYPTIYHLRKKLVDSTDKADLRLIYLALAHMIKFRGHFLIEGDLNPDNSDVDKLFIQLVQTYNQLFEENPINASGVDAKAILSARLSKSRRLENLIAQLPGEKKNGLFGNLIALSLGLTPNFKSNFDLAEDAKLQLSKDTYDDDLDNLLAQIGDQYADLFLAAKNLSDAILLSDILRVNTEITKAPLSASMIKRYDEHHQDLTLLKALVRQQLPEKYKEIFFDQSKNGYAGYIDGGASQEEFYKFIKPILEKMDGTEELLVKLNREDLLRKQRTFDNGSIPHQIHLGELHAILRRQEDFYPFLKDNREKIEKILTFRIPYYVGPLARGNSRFAWMTRKSEETITPWNFEEVVDKGASAQSFIERMTNFDKNLPNEKVLPKHSLLYEYFTVYNELTKVKYVTEGMRKPAFLSGEQKKAIVDLLFKTNRKVTVKQLKEDYFKKIECFDSVEISGVEDRFNASLGTYHDLLKIIKDKDFLDNEENEDILEDIVLTLTLFEDREMIEERLKTYAHLFDDKVMKQLKRRRYTGWGRLSRKLINGIRDKQSGKTILDFLKSDGFANRNFMQLIHDDSLTFKEDIQKAQVSGQGDSLHEHIANLAGSPAIKKGILQTVKVVDELVKVMGRHKPENIVIEMARENQTTQKGQKNSRERMKRIEEGIKELGSQILKEHPVENTQLQNEKLYLYYLQNGRDMYVDQELDINRLSDYDVDHIVPQSFLKDDSIDNKVLTRSDKARGKSDNVPSEEVVKKMKNYWRQLLNAKLITQRKFDNLTKAERGGLSELDKAGFIKRQLVETRQITKHVAQILDSRMNTKYDENDKLIREVKVITLKSKLVSDFRKDFQFYKVREINNYHHAHDAYLNAVVGTALIKKYPKLESEFVYGDYKVYDVRKMIAKSEQEIGKATAKYFFYSNIMNFFKTEITLANGEIRKRPLIETNGETGEIVWDKGRDFATVRKVLSMPQVNIVKKTEVQTGGFSKESILPKRNSDKLIARKKDWDPKKYGGFDSPTVAYSVLVVAKVEKGKSKKLKSVKELLGITIMERSSFEKNPIDFLEAKGYKEVKKDLIIKLPKYSLFELENGRKRMLASAGELQKGNELALPSKYVNFLYLASHYEKLKGSPEDNEQKQLFVEQHKHYLDEIIEQISEFSKRVILADANLDKVLSAYNKHRDKPIREQAENIIHLFTLTNLGAPAAFKYFDTTIDRKRYTSTKEVLDATLIHQSITGLYETRIDLSQLGGDGGPAPGGGGGSGGTLNIEDEYRLHETSKEPDVPLGSTWLSDFPQAWAETGGMGLAVRQAPLIIPLKATSTPVSIKQYPMSQEARLGIKPHIQRLLDQGILVPCQSPWNTPLLPVKKPGTNDYRPVQDLREVNKRVEDIHPTVPNPYNLLSGLPPSHQWYTVLDLKDAFFCLRLHPTSQPLFAFEWRDPEMGISGQLTWTRLPQGFKNSPTLFNEALHRDLADFRIQHPDLILLQYVDDLLLAATSEQDCQRGTRALLQTLGNLGYRASAKKAQICQKQVKYLGYLLKEGQRWLTEARKETVMGQPTPKTPRQLREFLGTAGFCRLWIPGFAEMAAPLYPLTKPGTLFNWGPDQQKAYQEIKQALLTAPALGLPDLTKPFELFVDEKQGYAKGVLTQKLGPWRRPVAYLSKKLDPVAAGWPPCLRMVAAIAVLTKDAGKLTMGQPLVILAPHAVEALVKQPPDRWLSNARMTHYQAMLLDTDRVQFGPVVALNPATLLPLPEKEAPHDCLEILAETHGTRPDLTDQPIPDADYTWYTDGSSFLQEGQRRAGAAVTTETEVIWARALPAGTSAQRAELIALTQALKMAEGKKLNVYTDSRYAFATAHVHGEIYRRRGWLTSEGREIKNKNEILALLKALFLPKRLSIIHCPGHQKGNSAEARGNRMADQAAREAAMKAVLETSTLLAGKRTADGSEFEKRTADGSEFESPKKKAKVE

SEQ ID NO: 7045 - protein, 2098 aa, synthetic construct
MPAAKRVKLDGGDKKYSIGLDIGTNSVGWAVITDEYKVPSKKFKVLGNTDRHSIKKNLIGALLFDSGETAEATRLKRTARRRYTRRKNRICYLQEIFSNEMAKVDDSFFHRLEESFLVEEDKKHERHPIFGNIVDEVAYHEKYPTIYHLRKKLVDSTDKADLRLIYLALAHMIKFRGHFLIEGDLNPDNSDVDKLFIQLVQTYNQLFEENPINASGVDAKAILSARLSKSRRLENLIAQLPGEKKNGLFGNLIALSLGLTPNFKSNFDLAEDAKLQLSKDTYDDDLDNLLAQIGDQYADLFLAAKNLSDAILLSDILRVNTEITKAPLSASMIKRYDEHHQDLTLLKALVRQQLPEKYKEIFFDQSKNGYAGYIDGGASQEEFYKFIKPILEKMDGTEELLVKLNREDLLRKQRTFDNGSIPHQIHLGELHAILRRQEDFYPFLKDNREKIEKILTFRIPYYVGPLARGNSRFAWMTRKSEETITPWNFEEVVDKGASAQSFIERMTNFDKNLPNEKVLPKHSLLYEYFTVYNELTKVKYVTEGMRKPAFLSGEQKKAIVDLLFKTNRKVTVKQLKEDYFKKIECFDSVEISGVEDRFNASLGTYHDLLKIIKDKDFLDNEENEDILEDIVLTLTLFEDREMIEERLKTYAHLFDDKVMKQLKRRRYTGWGRLSRKLINGIRDKQSGKTILDFLKSDGFANRNFMQLIHDDSLTFKEDIQKAQVSGQGDSLHEHIANLAGSPAIKKGILQTVKVVDELVKVMGRHKPENIVIEMARENQTTQKGQKNSRERMKRIEEGIKELGSQILKEHPVENTQLQNEKLYLYYLQNGRDMYVDQELDINRLSDYDVDHIVPQSFLKDDSIDNKVLTRSDKARGKSDNVPSEEVVKKMKNYWRQLLNAKLITQRKFDNLTKAERGGLSELDKAGFIKRQLVETRQITKHVAQILDSRMNTKYDENDKLIREVKVITLKSKLVSDFRKDFQFYKVREINNYHHAHDAYLNAVVGTALIKKYPKLESEFVYGDYKVYDVRKMIAKSEQEIGKATAKYFFYSNIMNFFKTEITLANGEIRKRPLIETNGETGEIVWDKGRDFATVRKVLSMPQVNIVKKTEVQTGGFSKESILPKRNSDKLIARKKDWDPKKYGGFDSPTVAYSVLVVAKVEKGKSKKLKSVKELLGITIMERSSFEKNPIDFLEAKGYKEVKKDLIIKLPKYSLFELENGRKRMLASAGELQKGNELALPSKYVNFLYLASHYEKLKGSPEDNEQKQLFVEQHKHYLDEIIEQISEFSKRVILADANLDKVLSAYNKHRDKPIREQAENIIHLFTLTNLGAPAAFKYFDTTIDRKRYTSTKEVLDATLIHQSITGLYETRIDLSQLGGDGGGGSGSSEAAAKGGTAPLEEEYRLFLEAPIQNVTLLEQWKREIPKVWAEINPPGLASTQAPIHVQLLSTALPVRVRQYPITLEAKRSLRETIRKFRAAGILRPVHSPWNTPLLPVRKSGTSEYRMVQDLREVNKRVETIHPTVPNPYTLLSLLPPDRIWYSVLDLKDAFFCIPLAPESQLIFAFEWADAEEGESGQLTWTRLPQGFKNSPTLFNEALNRDLQGFRLDHPSVSLLQYVDDLLIAADTQAACLSATRDLLMTLAELGYRVSGKKAQLCQEEVTYLGFKIHKGSRSLSNSRTQAILQIPVPKTKRQVREFLGTIGYCRLWIPGFAELAQPLYAATRPGNDPLVWGEKEEEAFQSLKLALTQPPALALPSLDKPFQLFVEETSGAAKGVLTQALGPWKRPVAYLSKRLDPVAAGWPRCLRAIAAAALLTREASKLTFGQDIEITSSHNLESLLRSPPDKWLTNARITQYQVLLLDPPRVRFKQTAALNPATLLPETDDTLPIHHCLDTLDSLTSTRPDLTDQPLAQAEATLFTDGSSYIRDGKRYAGAAVVTLDSVIWAEPLPIGTSAQKAELIALTKALEWSKDKSVNIYTDSRYAFATLHVHGMIYRERGWLTAGGKAIKNAPEILALLTAVWLPKRVAVMHCKGHQKDDAPTSTGNRRADEVAREVAIRPLSTQATISAGKRTADGSEFEKRTADGSEFESPKKKAKVE

SEQ ID NO: 7046 - protein, 2098 aa, synthetic construct
MPAAKRVKLDGGDKKYSIGLDIGTNSVGWAVITDEYKVPSKKFKVLGNTDRHSIKKNLIGALLFDSGETAEATRLKRTARRRYTRRKNRICYLQEIFSNEMAKVDDSFFHRLEESFLVEEDKKHERHPIFGNIVDEVAYHEKYPTIYHLRKKLVDSTDKADLRLIYLALAHMIKFRGHFLIEGDLNPDNSDVDKLFIQLVQTYNQLFEENPINASGVDAKAILSARLSKSRRLENLIAQLPGEKKNGLFGNLIALSLGLTPNFKSNFDLAEDAKLQLSKDTYDDDLDNLLAQIGDQYADLFLAAKNLSDAILLSDILRVNTEITKAPLSASMIKRYDEHHQDLTLLKALVRQQLPEKYKEIFFDQSKNGYAGYIDGGASQEEFYKFIKPILEKMDGTEELLVKLNREDLLRKQRTFDNGSIPHQIHLGELHAILRRQEDFYPFLKDNREKIEKILTFRIPYYVGPLARGNSRFAWMTRKSEETITPWNFEEVVDKGASAQSFIERMTNFDKNLPNEKVLPKHSLLYEYFTVYNELTKVKYVTEGMRKPAFLSGEQKKAIVDLLFKTNRKVTVKQLKEDYFKKIECFDSVEISGVEDRFNASLGTYHDLLKIIKDKDFLDNEENEDILEDIVLTLTLFEDREMIEERLKTYAHLFDDKVMKQLKRRRYTGWGRLSRKLINGIRDKQSGKTILDFLKSDGFANRNFMQLIHDDSLTFKEDIQKAQVSGQGDSLHEHIANLAGSPAIKKGILQTVKVVDELVKVMGRHKPENIVIEMARENQTTQKGQKNSRERMKRIEEGIKELGSQILKEHPVENTQLQNEKLYLYYLQNGRDMYVDQELDINRLSDYDVDHIVPQSFLKDDSIDNKVLTRSDKARGKSDNVPSEEVVKKMKNYWRQLLNAKLITQRKFDNLTKAERGGLSELDKAGFIKRQLVETRQITKHVAQILDSRMNTKYDENDKLIREVKVITLKSKLVSDFRKDFQFYKVREINNYHHAHDAYLNAVVGTALIKKYPKLESEFVYGDYKVYDVRKMIAKSEQEIGKATAKYFFYSNIMNFFKTEITLANGEIRKRPLIETNGETGEIVWDKGRDFATVRKVLSMPQVNIVKKTEVQTGGFSKESILPKRNSDKLIARKKDWDPKKYGGFDSPTVAYSVLVVAKVEKGKSKKLKSVKELLGITIMERSSFEKNPIDFLEAKGYKEVKKDLIIKLPKYSLFELENGRKRMLASAGELQKGNELALPSKYVNFLYLASHYEKLKGSPEDNEQKQLFVEQHKHYLDEIIEQISEFSKRVILADANLDKVLSAYNKHRDKPIREQAENIIHLFTLTNLGAPAAFKYFDTTIDRKRYTSTKEVLDATLIHQSITGLYETRIDLSQLGGDGGGGSGSSEAAAKGGTAPLEEEYRLFLEAPIQNVTLLEQWKREIPKVWAEINPPGLASTQAPIHVQLLSTALPVRVRQYPITLEAKRSLRETIRKFRAAGILRPVHSPWNTPLLPVRKSGTSEYRMVQDLREVNKRVETIHPTVPNPYTLLSLLPPDRIWYSVLDLKDAFFCIPLAPESQLIFAFEWADAEEGESGQLTWTRLPQGFKNSPTLFNEALNRDLQGFRLDHPSVSLLQYVDDLLIAADTQAACLSATRDLLMTLAELGYRVSGKKAQLCQEEVTYLGFKIHKGSRSLSNSRTQAILQIPVPKTKRQVREFLGKIGYCRLFIPGFAELAQPLYAATRPGNDPLVWGEKEEEAFQSLKLALTQPPALALPSLDKPFQLFVEETSGAAKGVLTQALGPWKRPVAYLSKRLDPVAAGWPRCLRAIAAAALLTREASKLTFGQDIEITSSHNLESLLRSPPDKWLTNARITQYQVLLLDPPRVRFKQTAALNPATLLPETDDTLPIHHCLDTLDSLTSTRPDLTDQPLAQAEATLFTDGSSYIRDGKRYAGAAVVTLDSVIWAEPLPIGTSAQKAELIALTKALEWSKDKSVNIYTDSRYAFATLHVHGMIYRERGWLTAGGKAIKNAPEILALLTAVWLPKRVAVMHCKGHQKDDAPTSTGNRRADEVAREVAIRPLSTQATISAGKRTADGSEFEKRTADGSEFESPKKKAKVE

SEQ ID NO: 7047 - protein, 2218 aa, synthetic construct
MPAAKRVKLDGGDKKYSIGLDIGTNSVGWAVITDEYKVPSKKFKVLGNTDRHSIKKNLIGALLFDSGETAEATRLKRTARRRYTRRKNRICYLQEIFSNEMAKVDDSFFHRLEESFLVEEDKKHERHPIFGNIVDEVAYHEKYPTIYHLRKKLVDSTDKADLRLIYLALAHMIKFRGHFLIEGDLNPDNSDVDKLFIQLVQTYNQLFEENPINASGVDAKAILSARLSKSRRLENLIAQLPGEKKNGLFGNLIALSLGLTPNFKSNFDLAEDAKLQLSKDTYDDDLDNLLAQIGDQYADLFLAAKNLSDAILLSDILRVNTEITKAPLSASMIKRYDEHHQDLTLLKALVRQQLPEKYKEIFFDQSKNGYAGYIDGGASQEEFYKFIKPILEKMDGTEELLVKLNREDLLRKQRTFDNGSIPHQIHLGELHAILRRQEDFYPFLKDNREKIEKILTFRIPYYVGPLARGNSRFAWMTRKSEETITPWNFEEVVDKGASAQSFIERMTNFDKNLPNEKVLPKHSLLYEYFTVYNELTKVKYVTEGMRKPAFLSGEQKKAIVDLLFKTNRKVTVKQLKEDYFKKIECFDSVEISGVEDRFNASLGTYHDLLKIIKDKDFLDNEENEDILEDIVLTLTLFEDREMIEERLKTYAHLFDDKVMKQLKRRRYTGWGRLSRKLINGIRDKQSGKTILDFLKSDGFANRNFMQLIHDDSLTFKEDIQKAQVSGQGDSLHEHIANLAGSPAIKKGILQTVKVVDELVKVMGRHKPENIVIEMARENQTTQKGQKNSRERMKRIEEGIKELGSQILKEHPVENTQLQNEKLYLYYLQNGRDMYVDQELDINRLSDYDVDHIVPQSFLKDDSIDNKVLTRSDKARGKSDNVPSEEVVKKMKNYWRQLLNAKLITQRKFDNLTKAERGGLSELDKAGFIKRQLVETRQITKHVAQILDSRMNTKYDENDKLIREVKVITLKSKLVSDFRKDFQFYKVREINNYHHAHDAYLNAVVGTALIKKYPKLESEFVYGDYKVYDVRKMIAKSEQEIGKATAKYFFYSNIMNFFKTEITLANGEIRKRPLIETNGETGEIVWDKGRDFATVRKVLSMPQVNIVKKTEVQTGGFSKESILPKRNSDKLIARKKDWDPKKYGGFDSPTVAYSVLVVAKVEKGKSKKLKSVKELLGITIMERSSFEKNPIDFLEAKGYKEVKKDLIIKLPKYSLFELENGRKRMLASAGELQKGNELALPSKYVNFLYLASHYEKLKGSPEDNEQKQLFVEQHKHYLDEIIEQISEFSKRVILADANLDKVLSAYNKHRDKPIREQAENIIHLFTLTNLGAPAAFKYFDTTIDRKRYTSTKEVLDATLIHQSITGLYETRIDLSQLGGDGGGGSGSSEAAAKGGTLGDQGSRGSDPLPEPRVTLTVEGIPTEFLVNTGAEHSVLTKPMGKMGSKRTVVAGATGSKVYPWTTKRLLKIGQKQVTHSFLVIPECPAPLLGRDLLTKLKAQIQFSTEGPQVTWEDRPAMCLVLNLEEEYRLHEKPVPPSIDPSWLQLFPMVWAEKAGMGLANQVPPVVVELKSDASPVAVRQYPMSKEAREGIRPHIQRFLDLGILVPCQSPWNTPLLPVKKPGTNDYRPVQDLREVNKRVQDIHPTVPNPYNLLSSLPPSHTWYSVLDLKDAFFCLKLHPNSQPLFAFEWRDPEKGNTGQLTWTRLPQGFKNSPTLFDEALHRDLASFRALNPQVVMLQYVDDLLVAAPTYRDCKEGTRRLLQELSKLGYRVSAKKAQLCREEVTYLGYLLKGGKRWLTPARKATVMKIPTPTTPRQVREFLGTAGFCRLWIPGFASLAAPLYPLTREKVPFTWTEAHQEAFGRIKEALLSAPALALPDLTKPFALYVDEKEGVARGVLTQTLGPWRRPVAYLSKKLDPVASGWPTCLKAIAAVALLLKDADKLTLGQNVLVIAPHNLESIVRQPPDRWMTNARMTHYQSLLLNERVSFAPPAILNPATLLPVESDDTPIHICSEILAEETGTRPDLRDQPLPGVPAWYTDGSSFIMDGRRQAGAAIVDNKRTVWASNLPEGTSAQKAELIALTQALRLAEGKSINIYTDSRYAFATAHVHGAIYKQRGLLTSAGKDIKNKEEILALLEAIHLPKRVAIIHCPGHQRGTDPVATGNRKADEAAKQAAQSTRILTETTKNAGKRTADGSEFEKRTADGSEFESPKKKAKVE

SEQ ID NO: 7048 - protein, 2096 aa, synthetic construct
MPAAKRVKLDGGDKKYSIGLDIGTNSVGWAVITDEYKVPSKKFKVLGNTDRHSIKKNLIGALLFDSGETAEATRLKRTARRRYTRRKNRICYLQEIFSNEMAKVDDSFFHRLEESFLVEEDKKHERHPIFGNIVDEVAYHEKYPTIYHLRKKLVDSTDKADLRLIYLALAHMIKFRGHFLIEGDLNPDNSDVDKLFIQLVQTYNQLFEENPINASGVDAKAILSARLSKSRRLENLIAQLPGEKKNGLFGNLIALSLGLTPNFKSNFDLAEDAKLQLSKDTYDDDLDNLLAQIGDQYADLFLAAKNLSDAILLSDILRVNTEITKAPLSASMIKRYDEHHQDLTLLKALVRQQLPEKYKEIFFDQSKNGYAGYIDGGASQEEFYKFIKPILEKMDGTEELLVKLNREDLLRKQRTFDNGSIPHQIHLGELHAILRRQEDFYPFLKDNREKIEKILTFRIPYYVGPLARGNSRFAWMTRKSEETITPWNFEEVVDKGASAQSFIERMTNFDKNLPNEKVLPKHSLLYEYFTVYNELTKVKYVTEGMRKPAFLSGEQKKAIVDLLFKTNRKVTVKQLKEDYFKKIECFDSVEISGVEDRFNASLGTYHDLLKIIKDKDFLDNEENEDILEDIVLTLTLFEDREMIEERLKTYAHLFDDKVMKQLKRRRYTGWGRLSRKLINGIRDKQSGKTILDFLKSDGFANRNFMQLIHDDSLTFKEDIQKAQVSGQGDSLHEHIANLAGSPAIKKGILQTVKVVDELVKVMGRHKPENIVIEMARENQTTQKGQKNSRERMKRIEEGIKELGSQILKEHPVENTQLQNEKLYLYYLQNGRDMYVDQELDINRLSDYDVDHIVPQSFLKDDSIDNKVLTRSDKARGKSDNVPSEEVVKKMKNYWRQLLNAKLITQRKFDNLTKAERGGLSELDKAGFIKRQLVETRQITKHVAQILDSRMNTKYDENDKLIREVKVITLKSKLVSDFRKDFQFYKVREINNYHHAHDAYLNAVVGTALIKKYPKLESEFVYGDYKVYDVRKMIAKSEQEIGKATAKYFFYSNIMNFFKTEITLANGEIRKRPLIETNGETGEIVWDKGRDFATVRKVLSMPQVNIVKKTEVQTGGFSKESILPKRNSDKLIARKKDWDPKKYGGFDSPTVAYSVLVVAKVEKGKSKKLKSVKELLGITIMERSSFEKNPIDFLEAKGYKEVKKDLIIKLPKYSLFELENGRKRMLASAGELQKGNELALPSKYVNFLYLASHYEKLKGSPEDNEQKQLFVEQHKHYLDEIIEQISEFSKRVILADANLDKVLSAYNKHRDKPIREQAENIIHLFTLTNLGAPAAFKYFDTTIDRKRYTSTKEVLDATLIHQSITGLYETRIDLSQLGGDGGGGSGSSEAAAKGGTLGIEDEYRLHETSTEPDVSLGSTWLSDFPQAWAETGGMGLAVRQAPLIIPLKATSTPVSIQQYPMSHEARLGIKPHIQRLLDQGILVPCQSPWNTPLLPVKKPGTNDYRPVQDLREVNKRVEDIHPTVPNPYNLLSGLPPSHQWYTVLDLKDAFFCLRLHPTSQPLFAFEWRDPGMGISGQLTWTRLPQGFKNSPTLFNEALHRDLADFRIQHPDLILLQYVDDILLAATSELDCQQGTRALLQTLGDLGYRASAKKAQICQKQVKYLGYLLREGQRWLTEARKETVMGQPVPKTPRQLREFLGTAGFCRLWIPGFAEMAAPLYPLTKPGTLFSWGPDQQKAYQEIKQALLTAPALGLPDLTKPFELFVDEKQGYAKGVLTQKLGPWRRPVAYLSKKLDPVAAGWPPCLRMVAAIAVLTKDAGKLTMGQPLVILAPHAVEALVKQPPDRWLSNARMTHYQAMLLDTDRVQFGPVVALNPATLLPLPEEGAPHDCLEILAETHGTRPDLTDQPIPDADHTWYTDGSSFLQEGQRKAGAAVTTETEVIWAGALPAGTSAQRAELIALTQALKMAEGKRLNVYTDSRYAFATAHIHGEIYRRRGWLTSEGREIKNKSEILALLKALFLPKRLSIIHCLGHQKGDSAEARGNRLADQAAREAAIKTPPDTSTLLAGKRTADGSEFEKRTADGSEFESPKKKAKVE

SEQ ID NO: 7049 - protein, 2096 aa, synthetic construct
MPAAKRVKLDGGDKKYSIGLDIGTNSVGWAVITDEYKVPSKKFKVLGNTDRHSIKKNLIGALLFDSGETAEATRLKRTARRRYTRRKNRICYLQEIFSNEMAKVDDSFFHRLEESFLVEEDKKHERHPIFGNIVDEVAYHEKYPTIYHLRKKLVDSTDKADLRLIYLALAHMIKFRGHFLIEGDLNPDNSDVDKLFIQLVQTYNQLFEENPINASGVDAKAILSARLSKSRRLENLIAQLPGEKKNGLFGNLIALSLGLTPNFKSNFDLAEDAKLQLSKDTYDDDLDNLLAQIGDQYADLFLAAKNLSDAILLSDILRVNTEITKAPLSASMIKRYDEHHQDLTLLKALVRQQLPEKYKEIFFDQSKNGYAGYIDGGASQEEFYKFIKPILEKMDGTEELLVKLNREDLLRKQRTFDNGSIPHQIHLGELHAILRRQEDFYPFLKDNREKIEKILTFRIPYYVGPLARGNSRFAWMTRKSEETITPWNFEEVVDKGASAQSFIERMTNFDKNLPNEKVLPKHSLLYEYFTVYNELTKVKYVTEGMRKPAFLSGEQKKAIVDLLFKTNRKVTVKQLKEDYFKKIECFDSVEISGVEDRFNASLGTYHDLLKIIKDKDFLDNEENEDILEDIVLTLTLFEDREMIEERLKTYAHLFDDKVMKQLKRRRYTGWGRLSRKLINGIRDKQSGKTILDFLKSDGFANRNFMQLIHDDSLTFKEDIQKAQVSGQGDSLHEHIANLAGSPAIKKGILQTVKVVDELVKVMGRHKPENIVIEMARENQTTQKGQKNSRERMKRIEEGIKELGSQILKEHPVENTQLQNEKLYLYYLQNGRDMYVDQELDINRLSDYDVDHIVPQSFLKDDSIDNKVLTRSDKARGKSDNVPSEEVVKKMKNYWRQLLNAKLITQRKFDNLTKAERGGLSELDKAGFIKRQLVETRQITKHVAQILDSRMNTKYDENDKLIREVKVITLKSKLVSDFRKDFQFYKVREINNYHHAHDAYLNAVVGTALIKKYPKLESEFVYGDYKVYDVRKMIAKSEQEIGKATAKYFFYSNIMNFFKTEITLANGEIRKRPLIETNGETGEIVWDKGRDFATVRKVLSMPQVNIVKKTEVQTGGFSKESILPKRNSDKLIARKKDWDPKKYGGFDSPTVAYSVLVVAKVEKGKSKKLKSVKELLGITIMERSSFEKNPIDFLEAKGYKEVKKDLIIKLPKYSLFELENGRKRMLASAGELQKGNELALPSKYVNFLYLASHYEKLKGSPEDNEQKQLFVEQHKHYLDEIIEQISEFSKRVILADANLDKVLSAYNKHRDKPIREQAENIIHLFTLTNLGAPAAFKYFDTTIDRKRYTSTKEVLDATLIHQSITGLYETRIDLSQLGGDGGGGSGSSEAAAKGGTLNIEDEYRLHEISTEPDVSPGSTWLSDFPQAWAETGGMGLAVRQAPLIIPLKATSTPVSIKQYPMSQEAKLGIKPHIQRLLDQGILVPCQSPWNTPLLPVKKPGTNDYRPVQGLREVNKRVEDIHPTVPNPYNLLSGLPTSHRWYTVLDLKDAFFCLRLHPTSQPLFASEWRDPGMGISGQLTWTRLPQGFKNSPTLFNEALHRGLADFRIQHPDLILLQYVDDLLLAATSELDCQQGTRALLKTLGNLGYRASAKKAQICQKQVKYLGYLLREGQRWLTEARKETVMGQPTPKTPRQLREFLGKAGFCRLFIPRFAEMAAPLYPLTKPGTLFNWGPDQQKAYHEIKQALLTAPALGLPDLTKPFELFVDEKQGYAKGVLTQKLGPWRRPVAYLSKKLDPVAAGWPPCLRMVAAIAVLTKDAGKLTMGQPLVILAPHAVEALVKQPPDRWLSNARMTHYQAMLLDTDRVQFGPVVALNPATLLPLPEEGAPHDCLEILAETHGTEPDLTDQPIPDADHTWYTDGSSFLQEGQRKAGAAVTTETEVIWARALPAGTSAQRAELIALTQALKMAEGKRLNVYTDSRYAFATAHIHGEIYKRRGWLTSEGREIKNKSEILALLKALFLPKRLSIIHCLGHQKGDSAEARGNRLADQAAREAAIKTPPDTSTLLAGKRTADGSEFEKRTADGSEFESPKKKAKVE

SEQ ID NO: 7050 - protein, 2090 aa, synthetic construct
MPAAKRVKLDGGDKKYSIGLDIGTNSVGWAVITDEYKVPSKKFKVLGNTDRHSIKKNLIGALLFDSGETAEATRLKRTARRRYTRRKNRICYLQEIFSNEMAKVDDSFFHRLEESFLVEEDKKHERHPIFGNIVDEVAYHEKYPTIYHLRKKLVDSTDKADLRLIYLALAHMIKFRGHFLIEGDLNPDNSDVDKLFIQLVQTYNQLFEENPINASGVDAKAILSARLSKSRRLENLIAQLPGEKKNGLFGNLIALSLGLTPNFKSNFDLAEDAKLQLSKDTYDDDLDNLLAQIGDQYADLFLAAKNLSDAILLSDILRVNTEITKAPLSASMIKRYDEHHQDLTLLKALVRQQLPEKYKEIFFDQSKNGYAGYIDGGASQEEFYKFIKPILEKMDGTEELLVKLNREDLLRKQRTFDNGSIPHQIHLGELHAILRRQEDFYPFLKDNREKIEKILTFRIPYYVGPLARGNSRFAWMTRKSEETITPWNFEEVVDKGASAQSFIERMTNFDKNLPNEKVLPKHSLLYEYFTVYNELTKVKYVTEGMRKPAFLSGEQKKAIVDLLFKTNRKVTVKQLKEDYFKKIECFDSVEISGVEDRFNASLGTYHDLLKIIKDKDFLDNEENEDILEDIVLTLTLFEDREMIEERLKTYAHLFDDKVMKQLKRRRYTGWGRLSRKLINGIRDKQSGKTILDFLKSDGFANRNFMQLIHDDSLTFKEDIQKAQVSGQGDSLHEHIANLAGSPAIKKGILQTVKVVDELVKVMGRHKPENIVIEMARENQTTQKGQKNSRERMKRIEEGIKELGSQILKEHPVENTQLQNEKLYLYYLQNGRDMYVDQELDINRLSDYDVDHIVPQSFLKDDSIDNKVLTRSDKARGKSDNVPSEEVVKKMKNYWRQLLNAKLITQRKFDNLTKAERGGLSELDKAGFIKRQLVETRQITKHVAQILDSRMNTKYDENDKLIREVKVITLKSKLVSDFRKDFQFYKVREINNYHHAHDAYLNAVVGTALIKKYPKLESEFVYGDYKVYDVRKMIAKSEQEIGKATAKYFFYSNIMNFFKTEITLANGEIRKRPLIETNGETGEIVWDKGRDFATVRKVLSMPQVNIVKKTEVQTGGFSKESILPKRNSDKLIARKKDWDPKKYGGFDSPTVAYSVLVVAKVEKGKSKKLKSVKELLGITIMERSSFEKNPIDFLEAKGYKEVKKDLIIKLPKYSLFELENGRKRMLASAGELQKGNELALPSKYVNFLYLASHYEKLKGSPEDNEQKQLFVEQHKHYLDEIIEQISEFSKRVILADANLDKVLSAYNKHRDKPIREQAENIIHLFTLTNLGAPAAFKYFDTTIDRKRYTSTKEVLDATLIHQSITGLYETRIDLSQLGGDGGGGSGSSEAAAKGGTLQLDDEYRLYSPLVKPDQNIQFWLEQFPQAWAETAGMGLAKQVPPQVIQLKASATPVSVRQYPLSKEAQEGIRPHVQRLIQQGILVPVQSPWNTPLLPVRKPGTNDYRPVQDLREVNKRVQDIHPTVPNPYNLLCALPPQRSWYTVLDLKDAFFCLRLHPTSQPLFAFEWRDPGTGRTGQLTWTRLPQGFKNSPTIFDEALHRDLANFRIQHPQVTLLQYVDDLLLAGATKQDCLEGTKALLLELSDLGYRASAKKAQICRREVTYLGYSLRDGQRWLTEARKKTVVQIPAPTTAKQVREFLGTAGFCRLWIPGFATLAAPLYPLTKEKGEFSWAPEHQKAFDAIKKALLSAPALALPDVTKPFTLYVDERKGVARGVLTQTLGPWRRPVAYLSKKLDPVASGWPVCLKAIAAVAILVKDADKLTLGQNITVIAPHALENIVRQPPDRWMTNARMTHYQSLLLTERVTFAPPAALNPATLLPEETDEPVTHDCHQLLIEETGVRKDLTDIPLTGEVLTWFTDGSSYVVEGKRMAGAAVVDGTRTIWASSLPEGTSAQKAELMALTQALRLAEGKSINIYTDSRYAFATAHVHGAIYKQRGLLTSAGREIKNKEEILSLLEALHLPKRLAIIHCPGHQKAKDPISRGNQMADRVAKQAAQGVNLLAGKRTADGSEFEKRTADGSEFESPKKKAKVE

SEQ ID NO: 7051 - protein, 2087 aa, synthetic construct
MPAAKRVKLDGGDKKYSIGLDIGTNSVGWAVITDEYKVPSKKFKVLGNTDRHSIKKNLIGALLFDSGETAEATRLKRTARRRYTRRKNRICYLQEIFSNEMAKVDDSFFHRLEESFLVEEDKKHERHPIFGNIVDEVAYHEKYPTIYHLRKKLVDSTDKADLRLIYLALAHMIKFRGHFLIEGDLNPDNSDVDKLFIQLVQTYNQLFEENPINASGVDAKAILSARLSKSRRLENLIAQLPGEKKNGLFGNLIALSLGLTPNFKSNFDLAEDAKLQLSKDTYDDDLDNLLAQIGDQYADLFLAAKNLSDAILLSDILRVNTEITKAPLSASMIKRYDEHHQDLTLLKALVRQQLPEKYKEIFFDQSKNGYAGYIDGGASQEEFYKFIKPILEKMDGTEELLVKLNREDLLRKQRTFDNGSIPHQIHLGELHAILRRQEDFYPFLKDNREKIEKILTFRIPYYVGPLARGNSRFAWMTRKSEETITPWNFEEVVDKGASAQSFIERMTNFDKNLPNEKVLPKHSLLYEYFTVYNELTKVKYVTEGMRKPAFLSGEQKKAIVDLLFKTNRKVTVKQLKEDYFKKIECFDSVEISGVEDRFNASLGTYHDLLKIIKDKDFLDNEENEDILEDIVLTLTLFEDREMIEERLKTYAHLFDDKVMKQLKRRRYTGWGRLSRKLINGIRDKQSGKTILDFLKSDGFANRNFMQLIHDDSLTFKEDIQKAQVSGQGDSLHEHIANLAGSPAIKKGILQTVKVVDELVKVMGRHKPENIVIEMARENQTTQKGQKNSRERMKRIEEGIKELGSQILKEHPVENTQLQNEKLYLYYLQNGRDMYVDQELDINRLSDYDVDHIVPQSFLKDDSIDNKVLTRSDKARGKSDNVPSEEVVKKMKNYWRQLLNAKLITQRKFDNLTKAERGGLSELDKAGFIKRQLVETRQITKHVAQILDSRMNTKYDENDKLIREVKVITLKSKLVSDFRKDFQFYKVREINNYHHAHDAYLNAVVGTALIKKYPKLESEFVYGDYKVYDVRKMIAKSEQEIGKATAKYFFYSNIMNFFKTEITLANGEIRKRPLIETNGETGEIVWDKGRDFATVRKVLSMPQVNIVKKTEVQTGGFSKESILPKRNSDKLIARKKDWDPKKYGGFDSPTVAYSVLVVAKVEKGKSKKLKSVKELLGITIMERSSFEKNPIDFLEAKGYKEVKKDLIIKLPKYSLFELENGRKRMLASAGELQKGNELALPSKYVNFLYLASHYEKLKGSPEDNEQKQLFVEQHKHYLDEIIEQISEFSKRVILADANLDKVLSAYNKHRDKPIREQAENIIHLFTLTNLGAPAAFKYFDTTIDRKRYTSTKEVLDATLIHQSITGLYETRIDLSQLGGDGGGGSGSSEAAAKGGIPWLMKKPLQLTTLVPLQEYEERLLKQTMLTGSYKEKLQSLFLKYDALWQHWENQVGHRRIKPHHIATGTVNPRPQKQYPINPKAKASIQTVINDLLKQGVLIQQNSIMNTPVYPVPKPDGKWRMVLDYREVNKTIPLIAAQNQHSAGILSSIFRGKYKTTLDLSNGFWAHSITPESYWLTAFTWLGQQYCWTRLPQGFLNSPALFNADVVDLLKEVPNVQVYVDDIYISHDDPREHLEQLEKVFSLLLNAGYVVSLKKSEIAQHEVEFLGFNITKEGRGLTETFKQKLLNITPPRDLKQLQSILGLLNFARNFIPNFSELVKPLYNIIATAPGKYITWTTDNSQQLQNIISMLNSAENLEERNPEVRLIMKVNTSPSAGYIRFYNEFAKRPIMYLNYVYTKAEVKFTNTEKLLTTIHKGLIKALDLGMGQEILVYSPIVSMTKIQKTPLPERKALPIRWITWMSYLEDPRIQFHYDKTLPELQQVPTVTDDIIAKIKHPSEFSMVFYTDGSAIKHPNVNKSHNAGMGIAQVQFKPEFTVINTWSIPLGDHTAQLAEVAAVEFACKKALKIDGPVLIVTDSFYVAESVNKELPYWQSNGFFNNKKKPLKHVSKWKSIADCIQLKPDIIIIHEKGHQPTASTFHTEGNNLADKLATQGSYVVNAGKRTADGSEFEKRTADGSEFESPKKKAKVE

SEQ ID NO: 7052 - protein, 2098 aa, synthetic construct
MPAAKRVKLDGGDKKYSIGLDIGTNSVGWAVITDEYKVPSKKFKVLGNTDRHSIKKNLIGALLFDSGETAEATRLKRTARRRYTRRKNRICYLQEIFSNEMAKVDDSFFHRLEESFLVEEDKKHERHPIFGNIVDEVAYHEKYPTIYHLRKKLVDSTDKADLRLIYLALAHMIKFRGHFLIEGDLNPDNSDVDKLFIQLVQTYNQLFEENPINASGVDAKAILSARLSKSRRLENLIAQLPGEKKNGLFGNLIALSLGLTPNFKSNFDLAEDAKLQLSKDTYDDDLDNLLAQIGDQYADLFLAAKNLSDAILLSDILRVNTEITKAPLSASMIKRYDEHHQDLTLLKALVRQQLPEKYKEIFFDQSKNGYAGYIDGGASQEEFYKFIKPILEKMDGTEELLVKLNREDLLRKQRTFDNGSIPHQIHLGELHAILRRQEDFYPFLKDNREKIEKILTFRIPYYVGPLARGNSRFAWMTRKSEETITPWNFEEVVDKGASAQSFIERMTNFDKNLPNEKVLPKHSLLYEYFTVYNELTKVKYVTEGMRKPAFLSGEQKKAIVDLLFKTNRKVTVKQLKEDYFKKIECFDSVEISGVEDRFNASLGTYHDLLKIIKDKDFLDNEENEDILEDIVLTLTLFEDREMIEERLKTYAHLFDDKVMKQLKRRRYTGWGRLSRKLINGIRDKQSGKTILDFLKSDGFANRNFMQLIHDDSLTFKEDIQKAQVSGQGDSLHEHIANLAGSPAIKKGILQTVKVVDELVKVMGRHKPENIVIEMARENQTTQKGQKNSRERMKRIEEGIKELGSQILKEHPVENTQLQNEKLYLYYLQNGRDMYVDQELDINRLSDYDVDHIVPQSFLKDDSIDNKVLTRSDKARGKSDNVPSEEVVKKMKNYWRQLLNAKLITQRKFDNLTKAERGGLSELDKAGFIKRQLVETRQITKHVAQILDSRMNTKYDENDKLIREVKVITLKSKLVSDFRKDFQFYKVREINNYHHAHDAYLNAVVGTALIKKYPKLESEFVYGDYKVYDVRKMIAKSEQEIGKATAKYFFYSNIMNFFKTEITLANGEIRKRPLIETNGETGEIVWDKGRDFATVRKVLSMPQVNIVKKTEVQTGGFSKESILPKRNSDKLIARKKDWDPKKYGGFDSPTVAYSVLVVAKVEKGKSKKLKSVKELLGITIMERSSFEKNPIDFLEAKGYKEVKKDLIIKLPKYSLFELENGRKRMLASAGELQKGNELALPSKYVNFLYLASHYEKLKGSPEDNEQKQLFVEQHKHYLDEIIEQISEFSKRVILADANLDKVLSAYNKHRDKPIREQAENIIHLFTLTNLGAPAAFKYFDTTIDRKRYTSTKEVLDATLIHQSITGLYETRIDLSQLGGDGGGGSEAAAKGSSGGTAPLEEEYRLFLEAPIQNVTLLEQWKREIPKVWAEINPPGLASTQAPIHVQLLSTALPVRVRQYPITLEAKRSLRETIRKFRAAGILRPVHSPWNTPLLPVRKSGTSEYRMVQDLREVNKRVETIHPTVPNPYTLLSLLPPDRIWYSVLDLKDAFFCIPLAPESQLIFAFEWADAEEGESGQLTWTRLPQGFKNSPTLFDEALNRDLQGFRLDHPSVSLLQYVDDLLIAADTQAACLSATRDLLMTLAELGYRVSGKKAQLCQEEVTYLGFKIHKGSRSLSNSRTQAILQIPVPKTKRQVREFLGTIGYCRLWIPGFAELAQPLYAATRGGNDPLVWGEKEEEAFQSLKLALTQPPALALPSLDKPFQLFVEETSGAAKGVLTQALGPWKRPVAYLSKRLDPVAAGWPRCLRAIAAAALLTREASKLTFGQDIEITSSHNLESLLRSPPDKWLTNARITQYQVLLLDPPRVRFKQTAALNPATLLPETDDTLPIHHCLDTLDSLTSTRPDLTDQPLAQAEATLFTDGSSYIRDGKRYAGAAVVTLDSVIWAEPLPIGTSAQKAELIALTKALEWSKDKSVNIYTDSRYAFATLHVHGMIYRERGLLTAGGKAIKNAPEILALLTAVWLPKRVAVMHCKGHQKDDAPTSTGNRRADEVAREVAIRPLSTQATISAGKRTADGSEFEKRTADGSEFESPKKKAKVE

SEQ ID NO: 7053 - protein, 2098 aa, synthetic construct
MPAAKRVKLDGGDKKYSIGLDIGTNSVGWAVITDEYKVPSKKFKVLGNTDRHSIKKNLIGALLFDSGETAEATRLKRTARRRYTRRKNRICYLQEIFSNEMAKVDDSFFHRLEESFLVEEDKKHERHPIFGNIVDEVAYHEKYPTIYHLRKKLVDSTDKADLRLIYLALAHMIKFRGHFLIEGDLNPDNSDVDKLFIQLVQTYNQLFEENPINASGVDAKAILSARLSKSRRLENLIAQLPGEKKNGLFGNLIALSLGLTPNFKSNFDLAEDAKLQLSKDTYDDDLDNLLAQIGDQYADLFLAAKNLSDAILLSDILRVNTEITKAPLSASMIKRYDEHHQDLTLLKALVRQQLPEKYKEIFFDQSKNGYAGYIDGGASQEEFYKFIKPILEKMDGTEELLVKLNREDLLRKQRTFDNGSIPHQIHLGELHAILRRQEDFYPFLKDNREKIEKILTFRIPYYVGPLARGNSRFAWMTRKSEETITPWNFEEVVDKGASAQSFIERMTNFDKNLPNEKVLPKHSLLYEYFTVYNELTKVKYVTEGMRKPAFLSGEQKKAIVDLLFKTNRKVTVKQLKEDYFKKIECFDSVEISGVEDRFNASLGTYHDLLKIIKDKDFLDNEENEDILEDIVLTLTLFEDREMIEERLKTYAHLFDDKVMKQLKRRRYTGWGRLSRKLINGIRDKQSGKTILDFLKSDGFANRNFMQLIHDDSLTFKEDIQKAQVSGQGDSLHEHIANLAGSPAIKKGILQTVKVVDELVKVMGRHKPENIVIEMARENQTTQKGQKNSRERMKRIEEGIKELGSQILKEHPVENTQLQNEKLYLYYLQNGRDMYVDQELDINRLSDYDVDHIVPQSFLKDDSIDNKVLTRSDKARGKSDNVPSEEVVKKMKNYWRQLLNAKLITQRKFDNLTKAERGGLSELDKAGFIKRQLVETRQITKHVAQILDSRMNTKYDENDKLIREVKVITLKSKLVSDFRKDFQFYKVREINNYHHAHDAYLNAVVGTALIKKYPKLESEFVYGDYKVYDVRKMIAKSEQEIGKATAKYFFYSNIMNFFKTEITLANGEIRKRPLIETNGETGEIVWDKGRDFATVRKVLSMPQVNIVKKTEVQTGGFSKESILPKRNSDKLIARKKDWDPKKYGGFDSPTVAYSVLVVAKVEKGKSKKLKSVKELLGITIMERSSFEKNPIDFLEAKGYKEVKKDLIIKLPKYSLFELENGRKRMLASAGELQKGNELALPSKYVNFLYLASHYEKLKGSPEDNEQKQLFVEQHKHYLDEIIEQISEFSKRVILADANLDKVLSAYNKHRDKPIREQAENIIHLFTLTNLGAPAAFKYFDTTIDRKRYTSTKEVLDATLIHQSITGLYETRIDLSQLGGDGGGGSEAAAKGSSGGTAPLEEEYRLFLEAPIQNVTLLEQWKREIPKVWAEINPPGLASTQAPIHVQLLSTALPVRVRQYPITLEAKRSLRETIRKFRAAGILRPVHSPWNTPLLPVRKSGTSEYRMVQDLREVNKRVETIHPTVPNPYTLLSLLPPDRIWYSVLDLKDAFFCIPLAPESQLIFAFEWADAEEGESGQLTWTRLPQGFKNSPTLFNEALNRDLQGFRLDHPSVSLLQYVDDLLIAADTQAACLSATRDLLMTLAELGYRVSGKKAQLCQEEVTYLGFKIHKGSRSLSNSRTQAILQIPVPKTKRQVREFLGTIGYCRLWIPGFAELAQPLYAATRPGNDPLVWGEKEEEAFQSLKLALTQPPALALPSLDKPFQLFVEETSGAAKGVLTQALGPWKRPVAYLSKRLDPVAAGWPRCLRAIAAAALLTREASKLTFGQDIEITSSHNLESLLRSPPDKWLTNARITQYQVLLLDPPRVRFKQTAALNPATLLPETDDTLPIHHCLDTLDSLTSTRPDLTDQPLAQAEATLFTDGSSYIRDGKRYAGAAVVTLDSVIWAEPLPIGTSAQKAELIALTKALEWSKDKSVNIYTDSRYAFATLHVHGMIYRERGWLTAGGKAIKNAPEILALLTAVWLPKRVAVMHCKGHQKDDAPTSTGNRRADEVAREVAIRPLSTQATISAGKRTADGSEFEKRTADGSEFESPKKKAKVE

SEQ ID NO: 7054 - protein, 2098 aa, synthetic construct
MPAAKRVKLDGGDKKYSIGLDIGTNSVGWAVITDEYKVPSKKFKVLGNTDRHSIKKNLIGALLFDSGETAEATRLKRTARRRYTRRKNRICYLQEIFSNEMAKVDDSFFHRLEESFLVEEDKKHERHPIFGNIVDEVAYHEKYPTIYHLRKKLVDSTDKADLRLIYLALAHMIKFRGHFLIEGDLNPDNSDVDKLFIQLVQTYNQLFEENPINASGVDAKAILSARLSKSRRLENLIAQLPGEKKNGLFGNLIALSLGLTPNFKSNFDLAEDAKLQLSKDTYDDDLDNLLAQIGDQYADLFLAAKNLSDAILLSDILRVNTEITKAPLSASMIKRYDEHHQDLTLLKALVRQQLPEKYKEIFFDQSKNGYAGYIDGGASQEEFYKFIKPILEKMDGTEELLVKLNREDLLRKQRTFDNGSIPHQIHLGELHAILRRQEDFYPFLKDNREKIEKILTFRIPYYVGPLARGNSRFAWMTRKSEETITPWNFEEVVDKGASAQSFIERMTNFDKNLPNEKVLPKHSLLYEYFTVYNELTKVKYVTEGMRKPAFLSGEQKKAIVDLLFKTNRKVTVKQLKEDYFKKIECFDSVEISGVEDRFNASLGTYHDLLKIIKDKDFLDNEENEDILEDIVLTLTLFEDREMIEERLKTYAHLFDDKVMKQLKRRRYTGWGRLSRKLINGIRDKQSGKTILDFLKSDGFANRNFMQLIHDDSLTFKEDIQKAQVSGQGDSLHEHIANLAGSPAIKKGILQTVKVVDELVKVMGRHKPENIVIEMARENQTTQKGQKNSRERMKRIEEGIKELGSQILKEHPVENTQLQNEKLYLYYLQNGRDMYVDQELDINRLSDYDVDHIVPQSFLKDDSIDNKVLTRSDKARGKSDNVPSEEVVKKMKNYWRQLLNAKLITQRKFDNLTKAERGGLSELDKAGFIKRQLVETRQITKHVAQILDSRMNTKYDENDKLIREVKVITLKSKLVSDFRKDFQFYKVREINNYHHAHDAYLNAVVGTALIKKYPKLESEFVYGDYKVYDVRKMIAKSEQEIGKATAKYFFYSNIMNFFKTEITLANGEIRKRPLIETNGETGEIVWDKGRDFATVRKVLSMPQVNIVKKTEVQTGGFSKESILPKRNSDKLIARKKDWDPKKYGGFDSPTVAYSVLVVAKVEKGKSKKLKSVKELLGITIMERSSFEKNPIDFLEAKGYKEVKKDLIIKLPKYSLFELENGRKRMLASAGELQKGNELALPSKYVNFLYLASHYEKLKGSPEDNEQKQLFVEQHKHYLDEIIEQISEFSKRVILADANLDKVLSAYNKHRDKPIREQAENIIHLFTLTNLGAPAAFKYFDTTIDRKRYTSTKEVLDATLIHQSITGLYETRIDLSQLGGDGGGGSEAAAKGSSGGTAPLEEEYRLFLEAPIQNVTLLEQWKREIPKVWAEINPPGLASTQAPIHVQLLSTALPVRVRQYPITLEAKRSLRETIRKFRAAGILRPVHSPWNTPLLPVRKSGTSEYRMVQDLREVNKRVETIHPTVPNPYTLLSLLPPDRIWYSVLDLKDAFFCIPLAPESQLIFAFEWADAEEGESGQLTWTRLPQGFKNSPTLFNEALNRDLQGFRLDHPSVSLLQYVDDLLIAADTQAACLSATRDLLMTLAELGYRVSGKKAQLCQEEVTYLGFKIHKGSRSLSNSRTQAILQIPVPKTKRQVREFLGKIGYCRLFIPGFAELAQPLYAATRPGNDPLVWGEKEEEAFQSLKLALTQPPALALPSLDKPFQLFVEETSGAAKGVLTQALGPWKRPVAYLSKRLDPVAAGWPRCLRAIAAAALLTREASKLTFGQDIEITSSHNLESLLRSPPDKWLTNARITQYQVLLLDPPRVRFKQTAALNPATLLPETDDTLPIHHCLDTLDSLTSTRPDLTDQPLAQAEATLFTDGSSYIRDGKRYAGAAVVTLDSVIWAEPLPIGTSAQKAELIALTKALEWSKDKSVNIYTDSRYAFATLHVHGMIYRERGWLTAGGKAIKNAPEILALLTAVWLPKRVAVMHCKGHQKDDAPTSTGNRRADEVAREVAIRPLSTQATISAGKRTADGSEFEKRTADGSEFESPKKKAKVE

SEQ ID NO: 7055 - protein, 2087 aa, synthetic construct
MPAAKRVKLDGGDKKYSIGLDIGTNSVGWAVITDEYKVPSKKFKVLGNTDRHSIKKNLIGALLFDSGETAEATRLKRTARRRYTRRKNRICYLQEIFSNEMAKVDDSFFHRLEESFLVEEDKKHERHPIFGNIVDEVAYHEKYPTIYHLRKKLVDSTDKADLRLIYLALAHMIKFRGHFLIEGDLNPDNSDVDKLFIQLVQTYNQLFEENPINASGVDAKAILSARLSKSRRLENLIAQLPGEKKNGLFGNLIALSLGLTPNFKSNFDLAEDAKLQLSKDTYDDDLDNLLAQIGDQYADLFLAAKNLSDAILLSDILRVNTEITKAPLSASMIKRYDEHHQDLTLLKALVRQQLPEKYKEIFFDQSKNGYAGYIDGGASQEEFYKFIKPILEKMDGTEELLVKLNREDLLRKQRTFDNGSIPHQIHLGELHAILRRQEDFYPFLKDNREKIEKILTFRIPYYVGPLARGNSRFAWMTRKSEETITPWNFEEVVDKGASAQSFIERMTNFDKNLPNEKVLPKHSLLYEYFTVYNELTKVKYVTEGMRKPAFLSGEQKKAIVDLLFKTNRKVTVKQLKEDYFKKIECFDSVEISGVEDRFNASLGTYHDLLKIIKDKDFLDNEENEDILEDIVLTLTLFEDREMIEERLKTYAHLFDDKVMKQLKRRRYTGWGRLSRKLINGIRDKQSGKTILDFLKSDGFANRNFMQLIHDDSLTFKEDIQKAQVSGQGDSLHEHIANLAGSPAIKKGILQTVKVVDELVKVMGRHKPENIVIEMARENQTTQKGQKNSRERMKRIEEGIKELGSQILKEHPVENTQLQNEKLYLYYLQNGRDMYVDQELDINRLSDYDVDHIVPQSFLKDDSIDNKVLTRSDKARGKSDNVPSEEVVKKMKNYWRQLLNAKLITQRKFDNLTKAERGGLSELDKAGFIKRQLVETRQITKHVAQILDSRMNTKYDENDKLIREVKVITLKSKLVSDFRKDFQFYKVREINNYHHAHDAYLNAVVGTALIKKYPKLESEFVYGDYKVYDVRKMIAKSEQEIGKATAKYFFYSNIMNFFKTEITLANGEIRKRPLIETNGETGEIVWDKGRDFATVRKVLSMPQVNIVKKTEVQTGGFSKESILPKRNSDKLIARKKDWDPKKYGGFDSPTVAYSVLVVAKVEKGKSKKLKSVKELLGITIMERSSFEKNPIDFLEAKGYKEVKKDLIIKLPKYSLFELENGRKRMLASAGELQKGNELALPSKYVNFLYLASHYEKLKGSPEDNEQKQLFVEQHKHYLDEIIEQISEFSKRVILADANLDKVLSAYNKHRDKPIREQAENIIHLFTLTNLGAPAAFKYFDTTIDRKRYTSTKEVLDATLIHQSITGLYETRIDLSQLGGDGGGGSEAAAKGSSGGVPWILKKPLELTIKLDLEEQQGTLLNNSILSKKGKEELKQLFEKYSALWQSWENQVGHRRIRPHKIATGTVKPTPQKQYHINPKAKPDIQIVINDLLKQGVLIQKESTMNTPVYPVPKPNGRWRMVLDYRAVNKVTPLIAVQNQHSYGILGSLFKGRYKTTIDLSNGFWAHPIVPEDYWITAFTWQGKQYCWTVLPQGFLNSPGLFTGDVVDLLQGIPNVEVYVDDVYISHDSEKEHLEYLDILFNRLKEAGYIISLKKSNIANSIVDFLGFQITNEGRGLTDTFKEKLENITAPTTLKQLQSILGLLNFARNFIPDFTELIAPLYALIPKSTKNYVPWQIEHSTTLETLITKLNGAEYLQGRKGDKTLIMKVNASYTTGYIRYYNEGEKKPISYVSIVFSKTELKFTELEKLLTTVHKGLLKALDLSMGQNIHVYSPIVSMQNIQKTPQTAKKALASRWLSWLSYLEDPRIRFFYDPQMPALKDLPAVDTGKDNKKHPSNFQHIFYTDGSAITSPTKEGHLNAGMGIVYFINKDGNLQKQQEWSISLGNHTAQFAEIAAFEFALKKCLPLGGNILVVTDSNYVAKAYNEELDVWASNGFVNNRKKPLKHISKWKSVADLKRLRPDVVVTHEPGHQKLDSSPHAYGNNLADQLATQASFKVHAGKRTADGSEFEKRTADGSEFESPKKKAKVE

SEQ ID NO: 7056 - protein, 2176 aa, synthetic construct
MPAAKRVKLDGGDKKYSIGLDIGTNSVGWAVITDEYKVPSKKFKVLGNTDRHSIKKNLIGALLFDSGETAEATRLKRTARRRYTRRKNRICYLQEIFSNEMAKVDDSFFHRLEESFLVEEDKKHERHPIFGNIVDEVAYHEKYPTIYHLRKKLVDSTDKADLRLIYLALAHMIKFRGHFLIEGDLNPDNSDVDKLFIQLVQTYNQLFEENPINASGVDAKAILSARLSKSRRLENLIAQLPGEKKNGLFGNLIALSLGLTPNFKSNFDLAEDAKLQLSKDTYDDDLDNLLAQIGDQYADLFLAAKNLSDAILLSDILRVNTEITKAPLSASMIKRYDEHHQDLTLLKALVRQQLPEKYKEIFFDQSKNGYAGYIDGGASQEEFYKFIKPILEKMDGTEELLVKLNREDLLRKQRTFDNGSIPHQIHLGELHAILRRQEDFYPFLKDNREKIEKILTFRIPYYVGPLARGNSRFAWMTRKSEETITPWNFEEVVDKGASAQSFIERMTNFDKNLPNEKVLPKHSLLYEYFTVYNELTKVKYVTEGMRKPAFLSGEQKKAIVDLLFKTNRKVTVKQLKEDYFKKIECFDSVEISGVEDRFNASLGTYHDLLKIIKDKDFLDNEENEDILEDIVLTLTLFEDREMIEERLKTYAHLFDDKVMKQLKRRRYTGWGRLSRKLINGIRDKQSGKTILDFLKSDGFANRNFMQLIHDDSLTFKEDIQKAQVSGQGDSLHEHIANLAGSPAIKKGILQTVKVVDELVKVMGRHKPENIVIEMARENQTTQKGQKNSRERMKRIEEGIKELGSQILKEHPVENTQLQNEKLYLYYLQNGRDMYVDQELDINRLSDYDVDHIVPQSFLKDDSIDNKVLTRSDKARGKSDNVPSEEVVKKMKNYWRQLLNAKLITQRKFDNLTKAERGGLSELDKAGFIKRQLVETRQITKHVAQILDSRMNTKYDENDKLIREVKVITLKSKLVSDFRKDFQFYKVREINNYHHAHDAYLNAVVGTALIKKYPKLESEFVYGDYKVYDVRKMIAKSEQEIGKATAKYFFYSNIMNFFKTEITLANGEIRKRPLIETNGETGEIVWDKGRDFATVRKVLSMPQVNIVKKTEVQTGGFSKESILPKRNSDKLIARKKDWDPKKYGGFDSPTVAYSVLVVAKVEKGKSKKLKSVKELLGITIMERSSFEKNPIDFLEAKGYKEVKKDLIIKLPKYSLFELENGRKRMLASAGELQKGNELALPSKYVNFLYLASHYEKLKGSPEDNEQKQLFVEQHKHYLDEIIEQISEFSKRVILADANLDKVLSAYNKHRDKPIREQAENIIHLFTLTNLGAPAAFKYFDTTIDRKRYTSTKEVLDATLIHQSITGLYETRIDLSQLGGDGGGGSEAAAKGSSGGMNPLQLLQPLPAEIKGTKLLAHWNSGATITCIPESFLEDEQPIKKTLIKTIHGEKQQNVYYVTFKVKGRKVEAEVIASPYEYILLSPTDVPWLTQQPLQLTILVPLQEYQEKILSKTALPEDQKQQLKTLFVKYDNLWQHWENQVGHRKIRPHNIATGDYPPRPQKQYPINPKAKPSIQIVIDDLLKQGVLTPQNSTMNTPVYPVPKPDGRWRMVLDYREVNKTIPLTAAQNQHSAGILATIVRQKYKTTLDLANGFWAHPITPESYWLTAFTWQGKQYCWTRLPQGFLNSPALFNADVVDLLKEIPNVQVYVDDIYLSHDDPKEHVQQLEKVFQILLQAGYVVSLKKSEIGQKTVEFLGFNITKEGRGLTDTFKTKLLNITPPKDLKQLQSILGKLNFARNFIPNFAELVQPLYNLIAPAKGKYIEWSEENTKQLNMVIEALNTASNLEERLPEQRLVIKVNTSPSAGYVRYYNETGKKPIMYLNYVFSKAELKFSMLEKLLTTMHKALIKAMDLAMGQEILVYSPIVSMTKIQKTPLPERKALPIRWITWMTYLEDPRIQFHYDKTLPELKHIPDVYTSSQSPVKHPSQYEGVFYTDGSAIKSPDPTKSNNAGMGIVHATYKPEYQVLNQWSIPLGNHTAQMAEIAAVEFACKKALKIPGPVLVITDSFYVAESANKELPYWKSNGFVNNKKKPLKHISKWKSIAECLSMKPDITIQHEKGISLQIPVFILKGNALADKLATQGSYVVNAGKRTADGSEFEKRTADGSEFESPKKKAKVE

SEQ ID NO: 7057 - protein, 2218 aa, synthetic construct
MPAAKRVKLDGGDKKYSIGLDIGTNSVGWAVITDEYKVPSKKFKVLGNTDRHSIKKNLIGALLFDSGETAEATRLKRTARRRYTRRKNRICYLQEIFSNEMAKVDDSFFHRLEESFLVEEDKKHERHPIFGNIVDEVAYHEKYPTIYHLRKKLVDSTDKADLRLIYLALAHMIKFRGHFLIEGDLNPDNSDVDKLFIQLVQTYNQLFEENPINASGVDAKAILSARLSKSRRLENLIAQLPGEKKNGLFGNLIALSLGLTPNFKSNFDLAEDAKLQLSKDTYDDDLDNLLAQIGDQYADLFLAAKNLSDAILLSDILRVNTEITKAPLSASMIKRYDEHHQDLTLLKALVRQQLPEKYKEIFFDQSKNGYAGYIDGGASQEEFYKFIKPILEKMDGTEELLVKLNREDLLRKQRTFDNGSIPHQIHLGELHAILRRQEDFYPFLKDNREKIEKILTFRIPYYVGPLARGNSRFAWMTRKSEETITPWNFEEVVDKGASAQSFIERMTNFDKNLPNEKVLPKHSLLYEYFTVYNELTKVKYVTEGMRKPAFLSGEQKKAIVDLLFKTNRKVTVKQLKEDYFKKIECFDSVEISGVEDRFNASLGTYHDLLKIIKDKDFLDNEENEDILEDIVLTLTLFEDREMIEERLKTYAHLFDDKVMKQLKRRRYTGWGRLSRKLINGIRDKQSGKTILDFLKSDGFANRNFMQLIHDDSLTFKEDIQKAQVSGQGDSLHEHIANLAGSPAIKKGILQTVKVVDELVKVMGRHKPENIVIEMARENQTTQKGQKNSRERMKRIEEGIKELGSQILKEHPVENTQLQNEKLYLYYLQNGRDMYVDQELDINRLSDYDVDHIVPQSFLKDDSIDNKVLTRSDKARGKSDNVPSEEVVKKMKNYWRQLLNAKLITQRKFDNLTKAERGGLSELDKAGFIKRQLVETRQITKHVAQILDSRMNTKYDENDKLIREVKVITLKSKLVSDFRKDFQFYKVREINNYHHAHDAYLNAVVGTALIKKYPKLESEFVYGDYKVYDVRKMIAKSEQEIGKATAKYFFYSNIMNFFKTEITLANGEIRKRPLIETNGETGEIVWDKGRDFATVRKVLSMPQVNIVKKTEVQTGGFSKESILPKRNSDKLIARKKDWDPKKYGGFDSPTVAYSVLVVAKVEKGKSKKLKSVKELLGITIMERSSFEKNPIDFLEAKGYKEVKKDLIIKLPKYSLFELENGRKRMLASAGELQKGNELALPSKYVNFLYLASHYEKLKGSPEDNEQKQLFVEQHKHYLDEIIEQISEFSKRVILADANLDKVLSAYNKHRDKPIREQAENIIHLFTLTNLGAPAAFKYFDTTIDRKRYTSTKEVLDATLIHQSITGLYETRIDLSQLGGDGGGGSEAAAKGSSGGTLGDQGSRGSDPLPEPRVTLTVEGIPTEFLVNTGAEHSVLTKPMGKMGSKRTVVAGATGSKVYPWTTKRLLKIGQKQVTHSFLVIPECPAPLLGRDLLTKLKAQIQFSTEGPQVTWEDRPAMCLVLNLEEEYRLHEKPVPPSIDPSWLQLFPMVWAEKAGMGLANQVPPVVVELKSDASPVAVRQYPMSKEAREGIRPHIQRFLDLGILVPCQSPWNTPLLPVKKPGTNDYRPVQDLREVNKRVQDIHPTVPNPYNLLSSLPPSHTWYSVLDLKDAFFCLKLHPNSQPLFAFEWRDPEKGNTGQLTWTRLPQGFKNSPTLFDEALHRDLASFRALNPQVVMLQYVDDLLVAAPTYRDCKEGTRRLLQELSKLGYRVSAKKAQLCREEVTYLGYLLKGGKRWLTPARKATVMKIPTPTTPRQVREFLGTAGFCRLWIPGFASLAAPLYPLTREKVPFTWTEAHQEAFGRIKEALLSAPALALPDLTKPFALYVDEKEGVARGVLTQTLGPWRRPVAYLSKKLDPVASGWPTCLKAIAAVALLLKDADKLTLGQNVLVIAPHNLESIVRQPPDRWMTNARMTHYQSLLLNERVSFAPPAILNPATLLPVESDDTPIHICSEILAEETGTRPDLRDQPLPGVPAWYTDGSSFIMDGRRQAGAAIVDNKRTVWASNLPEGTSAQKAELIALTQALRLAEGKSINIYTDSRYAFATAHVHGAIYKQRGLLTSAGKDIKNKEEILALLEAIHLPKRVAIIHCPGHQRGTDPVATGNRKADEAAKQAAQSTRILTETTKNAGKRTADGSEFEKRTADGSEFESPKKKAKVE

SEQ ID NO: 7058 - protein, 2127 aa, synthetic construct
MPAAKRVKLDGGDKKYSIGLDIGTNSVGWAVITDEYKVPSKKFKVLGNTDRHSIKKNLIGALLFDSGETAEATRLKRTARRRYTRRKNRICYLQEIFSNEMAKVDDSFFHRLEESFLVEEDKKHERHPIFGNIVDEVAYHEKYPTIYHLRKKLVDSTDKADLRLIYLALAHMIKFRGHFLIEGDLNPDNSDVDKLFIQLVQTYNQLFEENPINASGVDAKAILSARLSKSRRLENLIAQLPGEKKNGLFGNLIALSLGLTPNFKSNFDLAEDAKLQLSKDTYDDDLDNLLAQIGDQYADLFLAAKNLSDAILLSDILRVNTEITKAPLSASMIKRYDEHHQDLTLLKALVRQQLPEKYKEIFFDQSKNGYAGYIDGGASQEEFYKFIKPILEKMDGTEELLVKLNREDLLRKQRTFDNGSIPHQIHLGELHAILRRQEDFYPFLKDNREKIEKILTFRIPYYVGPLARGNSRFAWMTRKSEETITPWNFEEVVDKGASAQSFIERMTNFDKNLPNEKVLPKHSLLYEYFTVYNELTKVKYVTEGMRKPAFLSGEQKKAIVDLLFKTNRKVTVKQLKEDYFKKIECFDSVEISGVEDRFNASLGTYHDLLKIIKDKDFLDNEENEDILEDIVLTLTLFEDREMIEERLKTYAHLFDDKVMKQLKRRRYTGWGRLSRKLINGIRDKQSGKTILDFLKSDGFANRNFMQLIHDDSLTFKEDIQKAQVSGQGDSLHEHIANLAGSPAIKKGILQTVKVVDELVKVMGRHKPENIVIEMARENQTTQKGQKNSRERMKRIEEGIKELGSQILKEHPVENTQLQNEKLYLYYLQNGRDMYVDQELDINRLSDYDVDHIVPQSFLKDDSIDNKVLTRSDKARGKSDNVPSEEVVKKMKNYWRQLLNAKLITQRKFDNLTKAERGGLSELDKAGFIKRQLVETRQITKHVAQILDSRMNTKYDENDKLIREVKVITLKSKLVSDFRKDFQFYKVREINNYHHAHDAYLNAVVGTALIKKYPKLESEFVYGDYKVYDVRKMIAKSEQEIGKATAKYFFYSNIMNFFKTEITLANGEIRKRPLIETNGETGEIVWDKGRDFATVRKVLSMPQVNIVKKTEVQTGGFSKESILPKRNSDKLIARKKDWDPKKYGGFDSPTVAYSVLVVAKVEKGKSKKLKSVKELLGITIMERSSFEKNPIDFLEAKGYKEVKKDLIIKLPKYSLFELENGRKRMLASAGELQKGNELALPSKYVNFLYLASHYEKLKGSPEDNEQKQLFVEQHKHYLDEIIEQISEFSKRVILADANLDKVLSAYNKHRDKPIREQAENIIHLFTLTNLGAPAAFKYFDTTIDRKRYTSTKEVLDATLIHQSITGLYETRIDLSQLGGDGGGGSEAAAKGSSGGLLGRDLLTKLKAQIQFSTEGPQVTWEDRPAMCLVLNLEEEYRLHEKPVPPSIDPSWLQLFPMVWAEKAGMGLANQVPPVVVELKSDASPVAVRQYPMSKEAREGIRPHIQRFLDLGILVPCQSPWNTPLLPVKKPGTNDYRPVQDLREVNKRVQDIHPTVPNPYNLLSSLPPSHTWYSVLDLKDAFFCLKLHPNSQPLFAFEWRDPEKGNTGQLTWTRLPQGFKNSPTLFNEALHRDLASFRALNPQVVMLQYVDDLLVAAPTYRDCKEGTRRLLQELSKLGYRVSAKKAQLCREEVTYLGYLLKGGKRWLTPARKATVMKIPTPTTPRQVREFLGTAGFCRLWIPGFASLAAPLYPLTRPKVPFTWTEAHQEAFGRIKEALLSAPALALPDLTKPFALYVDEKEGVARGVLTQTLGPWRRPVAYLSKKLDPVASGWPTCLKAIAAVALLLKDADKLTLGQNVLVIAPHNLESIVRQPPDRWMTNARMTHYQSLLLNERVSFAPPAILNPATLLPVESDDTPIHICSEILAEETGTRPDLRDQPLPGVPAWYTDGSSFIMDGRRQAGAAIVDNKRTVWASNLPEGTSAQKAELIALTQALRLAEGKSINIYTDSRYAFATAHVHGAIYKQRGWLTSAGKDIKNKEEILALLEAIHLPKRVAIIHCPGHQRGTDPVATGNRKADEAAKQAAQSTRILTETTKNAGKRTADGSEFEKRTADGSEFESPKKKAKVE

SEQ ID NO: 7059 - protein, 2096 aa, synthetic construct
MPAAKRVKLDGGDKKYSIGLDIGTNSVGWAVITDEYKVPSKKFKVLGNTDRHSIKKNLIGALLFDSGETAEATRLKRTARRRYTRRKNRICYLQEIFSNEMAKVDDSFFHRLEESFLVEEDKKHERHPIFGNIVDEVAYHEKYPTIYHLRKKLVDSTDKADLRLIYLALAHMIKFRGHFLIEGDLNPDNSDVDKLFIQLVQTYNQLFEENPINASGVDAKAILSARLSKSRRLENLIAQLPGEKKNGLFGNLIALSLGLTPNFKSNFDLAEDAKLQLSKDTYDDDLDNLLAQIGDQYADLFLAAKNLSDAILLSDILRVNTEITKAPLSASMIKRYDEHHQDLTLLKALVRQQLPEKYKEIFFDQSKNGYAGYIDGGASQEEFYKFIKPILEKMDGTEELLVKLNREDLLRKQRTFDNGSIPHQIHLGELHAILRRQEDFYPFLKDNREKIEKILTFRIPYYVGPLARGNSRFAWMTRKSEETITPWNFEEVVDKGASAQSFIERMTNFDKNLPNEKVLPKHSLLYEYFTVYNELTKVKYVTEGMRKPAFLSGEQKKAIVDLLFKTNRKVTVKQLKEDYFKKIECFDSVEISGVEDRFNASLGTYHDLLKIIKDKDFLDNEENEDILEDIVLTLTLFEDREMIEERLKTYAHLFDDKVMKQLKRRRYTGWGRLSRKLINGIRDKQSGKTILDFLKSDGFANRNFMQLIHDDSLTFKEDIQKAQVSGQGDSLHEHIANLAGSPAIKKGILQTVKVVDELVKVMGRHKPENIVIEMARENQTTQKGQKNSRERMKRIEEGIKELGSQILKEHPVENTQLQNEKLYLYYLQNGRDMYVDQELDINRLSDYDVDHIVPQSFLKDDSIDNKVLTRSDKARGKSDNVPSEEVVKKMKNYWRQLLNAKLITQRKFDNLTKAERGGLSELDKAGFIKRQLVETRQITKHVAQILDSRMNTKYDENDKLIREVKVITLKSKLVSDFRKDFQFYKVREINNYHHAHDAYLNAVVGTALIKKYPKLESEFVYGDYKVYDVRKMIAKSEQEIGKATAKYFFYSNIMNFFKTEITLANGEIRKRPLIETNGETGEIVWDKGRDFATVRKVLSMPQVNIVKKTEVQTGGFSKESILPKRNSDKLIARKKDWDPKKYGGFDSPTVAYSVLVVAKVEKGKSKKLKSVKELLGITIMERSSFEKNPIDFLEAKGYKEVKKDLIIKLPKYSLFELENGRKRMLASAGELQKGNELALPSKYVNFLYLASHYEKLKGSPEDNEQKQLFVEQHKHYLDEIIEQISEFSKRVILADANLDKVLSAYNKHRDKPIREQAENIIHLFTLTNLGAPAAFKYFDTTIDRKRYTSTKEVLDATLIHQSITGLYETRIDLSQLGGDGGGGSEAAAKGSSGGTLGIEDEYRLHETSTEPDVSLGSTWLSDFPQAWAETGGMGLAVRQAPLIIPLKATSTPVSIQQYPMSHEARLGIKPHIQRLLDQGILVPCQSPWNTPLLPVKKPGTNDYRPVQDLREVNKRVEDIHPTVPNPYNLLSGLPPSHQWYTVLDLKDAFFCLRLHPTSQPLFAFEWRDPGMGISGQLTWTRLPQGFKNSPTLFDEALHRDLADFRIQHPDLILLQYVDDILLAATSELDCQQGTRALLQTLGDLGYRASAKKAQICQKQVKYLGYLLREGQRWLTEARKETVMGQPVPKTPRQLREFLGTAGFCRLWIPGFAEMAAPLYPLTKTGTLFSWGPDQQKAYQEIKQALLTAPALGLPDLTKPFELFVDEKQGYAKGVLTQKLGPWRRPVAYLSKKLDPVAAGWPPCLRMVAAIAVLTKDAGKLTMGQPLVILAPHAVEALVKQPPDRWLSNARMTHYQAMLLDTDRVQFGPVVALNPATLLPLPEEGAPHDCLEILAETHGTRPDLTDQPIPDADHTWYTDGSSFLQEGQRKAGAAVTTETEVIWAGALPAGTSAQRAELIALTQALKMAEGKRLNVYTDSRYAFATAHIHGEIYRRRGLLTSEGREIKNKSEILALLKALFLPKRLSIIHCLGHQKGDSAEARGNRLADQAAREAAIKTPPDTSTLLAGKRTADGSEFEKRTADGSEFESPKKKAKVE

SEQ ID NO: 7060 - protein, 2096 aa, synthetic construct
MPAAKRVKLDGGDKKYSIGLDIGTNSVGWAVITDEYKVPSKKFKVLGNTDRHSIKKNLIGALLFDSGETAEATRLKRTARRRYTRRKNRICYLQEIFSNEMAKVDDSFFHRLEESFLVEEDKKHERHPIFGNIVDEVAYHEKYPTIYHLRKKLVDSTDKADLRLIYLALAHMIKFRGHFLIEGDLNPDNSDVDKLFIQLVQTYNQLFEENPINASGVDAKAILSARLSKSRRLENLIAQLPGEKKNGLFGNLIALSLGLTPNFKSNFDLAEDAKLQLSKDTYDDDLDNLLAQIGDQYADLFLAAKNLSDAILLSDILRVNTEITKAPLSASMIKRYDEHHQDLTLLKALVRQQLPEKYKEIFFDQSKNGYAGYIDGGASQEEFYKFIKPILEKMDGTEELLVKLNREDLLRKQRTFDNGSIPHQIHLGELHAILRRQEDFYPFLKDNREKIEKILTFRIPYYVGPLARGNSRFAWMTRKSEETITPWNFEEVVDKGASAQSFIERMTNFDKNLPNEKVLPKHSLLYEYFTVYNELTKVKYVTEGMRKPAFLSGEQKKAIVDLLFKTNRKVTVKQLKEDYFKKIECFDSVEISGVEDRFNASLGTYHDLLKIIKDKDFLDNEENEDILEDIVLTLTLFEDREMIEERLKTYAHLFDDKVMKQLKRRRYTGWGRLSRKLINGIRDKQSGKTILDFLKSDGFANRNFMQLIHDDSLTFKEDIQKAQVSGQGDSLHEHIANLAGSPAIKKGILQTVKVVDELVKVMGRHKPENIVIEMARENQTTQKGQKNSRERMKRIEEGIKELGSQILKEHPVENTQLQNEKLYLYYLQNGRDMYVDQELDINRLSDYDVDHIVPQSFLKDDSIDNKVLTRSDKARGKSDNVPSEEVVKKMKNYWRQLLNAKLITQRKFDNLTKAERGGLSELDKAGFIKRQLVETRQITKHVAQILDSRMNTKYDENDKLIREVKVITLKSKLVSDFRKDFQFYKVREINNYHHAHDAYLNAVVGTALIKKYPKLESEFVYGDYKVYDVRKMIAKSEQEIGKATAKYFFYSNIMNFFKTEITLANGEIRKRPLIETNGETGEIVWDKGRDFATVRKVLSMPQVNIVKKTEVQTGGFSKESILPKRNSDKLIARKKDWDPKKYGGFDSPTVAYSVLVVAKVEKGKSKKLKSVKELLGITIMERSSFEKNPIDFLEAKGYKEVKKDLIIKLPKYSLFELENGRKRMLASAGELQKGNELALPSKYVNFLYLASHYEKLKGSPEDNEQKQLFVEQHKHYLDEIIEQISEFSKRVILADANLDKVLSAYNKHRDKPIREQAENIIHLFTLTNLGAPAAFKYFDTTIDRKRYTSTKEVLDATLIHQSITGLYETRIDLSQLGGDGGGGSEAAAKGSSGGTLNIEDEYRLHETSKGPDVPLGSTWLSDFPQAWAETGGMGLAVRQAPLIIPLKATSTPVSIKQYPMSQEARLGIKPHIQRLLDQGILVPCQSPWNTPLLPVKKPGTNDYRPVQDLREVNKRVEDIHPTVPNPYNLLSGLPPSHQWYTVLDLKDAFFCLRLHPTSQSLFAFEWRDPEMGISGQLTWTRLPQGFKNSPTLFNEALHRDLADFRIQHPDLILLQYVDDLLLAATSELDCQQGTRALLQTLGDLGYRASAKKAQICQKQVKYLGYLLKEGQRWLTEARKETVMGQPTPKTPRQLREFLGTAGFCRLWIPGFAEMAAPLYPLTKPGTLFEWGPDQQKAYQEIKQALLTAPALGLPDLTKPFELFVDEKQGYAKGVLTQKLGPWRRPVAYLSKKLDPVAAGWPPCLRMVAAIAVLTKDAGKLTMGQPLVILAPHAVEALVKQPPDRWLSNARMTHYQALLLDTDRVQFGPIVALNPATLLPLPEEGLQHDCLDILAEAHGTRPDLTDQPLPDADHTWYTDGSSFLQEGQRKAGAAVTTETEVVWAKALPAGTSAQRAELIALTQALKMAEGKKLNVYTDSRYAFATAHIHGEIYRRRGWLTSEGKEIKNKDEILALLKALFLPKRLSIIHCPGHQKGNRAEARGNRMADQAAREVATRETPETSTLLAGKRTADGSEFEKRTADGSEFESPKKKAKVE

SEQ ID NO: 7061 - protein, 2116 aa, synthetic construct
MPAAKRVKLDGGDKKYSIGLDIGTNSVGWAVITDEYKVPSKKFKVLGNTDRHSIKKNLIGALLFDSGETAEATRLKRTARRRYTRRKNRICYLQEIFSNEMAKVDDSFFHRLEESFLVEEDKKHERHPIFGNIVDEVAYHEKYPTIYHLRKKLVDSTDKADLRLIYLALAHMIKFRGHFLIEGDLNPDNSDVDKLFIQLVQTYNQLFEENPINASGVDAKAILSARLSKSRRLENLIAQLPGEKKNGLFGNLIALSLGLTPNFKSNFDLAEDAKLQLSKDTYDDDLDNLLAQIGDQYADLFLAAKNLSDAILLSDILRVNTEITKAPLSASMIKRYDEHHQDLTLLKALVRQQLPEKYKEIFFDQSKNGYAGYIDGGASQEEFYKFIKPILEKMDGTEELLVKLNREDLLRKQRTFDNGSIPHQIHLGELHAILRRQEDFYPFLKDNREKIEKILTFRIPYYVGPLARGNSRFAWMTRKSEETITPWNFEEVVDKGASAQSFIERMTNFDKNLPNEKVLPKHSLLYEYFTVYNELTKVKYVTEGMRKPAFLSGEQKKAIVDLLFKTNRKVTVKQLKEDYFKKIECFDSVEISGVEDRFNASLGTYHDLLKIIKDKDFLDNEENEDILEDIVLTLTLFEDREMIEERLKTYAHLFDDKVMKQLKRRRYTGWGRLSRKLINGIRDKQSGKTILDFLKSDGFANRNFMQLIHDDSLTFKEDIQKAQVSGQGDSLHEHIANLAGSPAIKKGILQTVKVVDELVKVMGRHKPENIVIEMARENQTTQKGQKNSRERMKRIEEGIKELGSQILKEHPVENTQLQNEKLYLYYLQNGRDMYVDQELDINRLSDYDVDHIVPQSFLKDDSIDNKVLTRSDKARGKSDNVPSEEVVKKMKNYWRQLLNAKLITQRKFDNLTKAERGGLSELDKAGFIKRQLVETRQITKHVAQILDSRMNTKYDENDKLIREVKVITLKSKLVSDFRKDFQFYKVREINNYHHAHDAYLNAVVGTALIKKYPKLESEFVYGDYKVYDVRKMIAKSEQEIGKATAKYFFYSNIMNFFKTEITLANGEIRKRPLIETNGETGEIVWDKGRDFATVRKVLSMPQVNIVKKTEVQTGGFSKESILPKRNSDKLIARKKDWDPKKYGGFDSPTVAYSVLVVAKVEKGKSKKLKSVKELLGITIMERSSFEKNPIDFLEAKGYKEVKKDLIIKLPKYSLFELENGRKRMLASAGELQKGNELALPSKYVNFLYLASHYEKLKGSPEDNEQKQLFVEQHKHYLDEIIEQISEFSKRVILADANLDKVLSAYNKHRDKPIREQAENIIHLFTLTNLGAPAAFKYFDTTIDRKRYTSTKEVLDATLIHQSITGLYETRIDLSQLGGDGGGGSEAAAKGSSGGWVQEISDSRPMLHIYLNGRRFLGLLNTGADKTCIAGRDWPANWPIHQTESSLQGLGMACGVARSSQPLRWQHEDKSGIIHPFVIPTLPFTLWGRDIMKDIKVRLMTDSPDDSQDLMIGAIESNLFADQISWKSDQPVWLNQWPLKQEKLQALQQLVTEQLQLGHLEESNSPWNTPVFVIKKKSGKWRLLQDLRAVNATMHDMGALQPGLPSPVAVPKGWEIIIIDLQDCFFNIKLHPEDCKRFAFSVPSPNFKRPYQRFQWKVLPQGMKNSPTLCQKFVDKAILTVRDKYQDSYIVHYMDDILLAHPSRSIVDEILTSMIQALNKHGLVVSTEKIQKYDNLKYLGTHIQGDSVSYQKLQIRTDKLRTLNDFQKLLGNINWIRPFLKLTTGELKPLFEILNGDSNPISTRKLTPEACKALQLMNERLSTARVKRLDLSQPWSLCILKTEYTPTACLWQDGVVEWIHLPHISPKVITPYDIFCTQLIIKGRHRSKELFSKDPDYIVVPYTKVQFDLLLQEKEDWPISLLGFLGEVHFHLPKDPLLTFTLQTAIIFPHMTSTTPLEKGIVIFTDGSANGRSVTYIQGREPIIKENTQNTAQQAEIVAVITAFEEVSQPFNLYTDSKYVTGLFPEIETATLSPRTKIYTELKHLQRLIHKRQEKFYIGHIRGHTGLPGPLAQGNAYADSLTRILTAGKRTADGSEFEKRTADGSEFESPKKKAKVE

SEQ ID NO: 7062 - protein, 2090 aa, synthetic construct
MPAAKRVKLDGGDKKYSIGLDIGTNSVGWAVITDEYKVPSKKFKVLGNTDRHSIKKNLIGALLFDSGETAEATRLKRTARRRYTRRKNRICYLQEIFSNEMAKVDDSFFHRLEESFLVEEDKKHERHPIFGNIVDEVAYHEKYPTIYHLRKKLVDSTDKADLRLIYLALAHMIKFRGHFLIEGDLNPDNSDVDKLFIQLVQTYNQLFEENPINASGVDAKAILSARLSKSRRLENLIAQLPGEKKNGLFGNLIALSLGLTPNFKSNFDLAEDAKLQLSKDTYDDDLDNLLAQIGDQYADLFLAAKNLSDAILLSDILRVNTEITKAPLSASMIKRYDEHHQDLTLLKALVRQQLPEKYKEIFFDQSKNGYAGYIDGGASQEEFYKFIKPILEKMDGTEELLVKLNREDLLRKQRTFDNGSIPHQIHLGELHAILRRQEDFYPFLKDNREKIEKILTFRIPYYVGPLARGNSRFAWMTRKSEETITPWNFEEVVDKGASAQSFIERMTNFDKNLPNEKVLPKHSLLYEYFTVYNELTKVKYVTEGMRKPAFLSGEQKKAIVDLLFKTNRKVTVKQLKEDYFKKIECFDSVEISGVEDRFNASLGTYHDLLKIIKDKDFLDNEENEDILEDIVLTLTLFEDREMIEERLKTYAHLFDDKVMKQLKRRRYTGWGRLSRKLINGIRDKQSGKTILDFLKSDGFANRNFMQLIHDDSLTFKEDIQKAQVSGQGDSLHEHIANLAGSPAIKKGILQTVKVVDELVKVMGRHKPENIVIEMARENQTTQKGQKNSRERMKRIEEGIKELGSQILKEHPVENTQLQNEKLYLYYLQNGRDMYVDQELDINRLSDYDVDHIVPQSFLKDDSIDNKVLTRSDKARGKSDNVPSEEVVKKMKNYWRQLLNAKLITQRKFDNLTKAERGGLSELDKAGFIKRQLVETRQITKHVAQILDSRMNTKYDENDKLIREVKVITLKSKLVSDFRKDFQFYKVREINNYHHAHDAYLNAVVGTALIKKYPKLESEFVYGDYKVYDVRKMIAKSEQEIGKATAKYFFYSNIMNFFKTEITLANGEIRKRPLIETNGETGEIVWDKGRDFATVRKVLSMPQVNIVKKTEVQTGGFSKESILPKRNSDKLIARKKDWDPKKYGGFDSPTVAYSVLVVAKVEKGKSKKLKSVKELLGITIMERSSFEKNPIDFLEAKGYKEVKKDLIIKLPKYSLFELENGRKRMLASAGELQKGNELALPSKYVNFLYLASHYEKLKGSPEDNEQKQLFVEQHKHYLDEIIEQISEFSKRVILADANLDKVLSAYNKHRDKPIREQAENIIHLFTLTNLGAPAAFKYFDTTIDRKRYTSTKEVLDATLIHQSITGLYETRIDLSQLGGDGGGGSEAAAKGSSGGTLQLDDEYRLYSPLVKPDQNIQFWLEQFPQAWAETAGMGLAKQVPPQVIQLKASATPVSVRQYPLSKEAQEGIRPHVQRLIQQGILVPVQSPWNTPLLPVRKPGTNDYRPVQDLREVNKRVQDIHPTVPNPYNLLCALPPQRSWYTVLDLKDAFFCLRLHPTSQPLFAFEWRDPGTGRTGQLTWTRLPQGFKNSPTIFDEALHRDLANFRIQHPQVTLLQYVDDLLLAGATKQDCLEGTKALLLELSDLGYRASAKKAQICRREVTYLGYSLRDGQRWLTEARKKTVVQIPAPTTAKQVREFLGTAGFCRLWIPGFATLAAPLYPLTKEKGEFSWAPEHQKAFDAIKKALLSAPALALPDVTKPFTLYVDERKGVARGVLTQTLGPWRRPVAYLSKKLDPVASGWPVCLKAIAAVAILVKDADKLTLGQNITVIAPHALENIVRQPPDRWMTNARMTHYQSLLLTERVTFAPPAALNPATLLPEETDEPVTHDCHQLLIEETGVRKDLTDIPLTGEVLTWFTDGSSYVVEGKRMAGAAVVDGTRTIWASSLPEGTSAQKAELMALTQALRLAEGKSINIYTDSRYAFATAHVHGAIYKQRGLLTSAGREIKNKEEILSLLEALHLPKRLAIIHCPGHQKAKDPISRGNQMADRVAKQAAQGVNLLAGKRTADGSEFEKRTADGSEFESPKKKAKVE

SEQ ID NO: 7063 - protein, 2090 aa, synthetic construct; identical to SEQ ID NO: 7062

SEQ ID NO: 7064 - protein, 2094 aa, synthetic construct
MPAAKRVKLDGGDKKYSIGLDIGTNSVGWAVITDEYKVPSKKFKVLGNTDRHSIKKNLIGALLFDSGETAEATRLKRTARRRYTRRKNRICYLQEIFSNEMAKVDDSFFHRLEESFLVEEDKKHERHPIFGNIVDEVAYHEKYPTIYHLRKKLVDSTDKADLRLIYLALAHMIKFRGHFLIEGDLNPDNSDVDKLFIQLVQTYNQLFEENPINASGVDAKAILSARLSKSRRLENLIAQLPGEKKNGLFGNLIALSLGLTPNFKSNFDLAEDAKLQLSKDTYDDDLDNLLAQIGDQYADLFLAAKNLSDAILLSDILRVNTEITKAPLSASMIKRYDEHHQDLTLLKALVRQQLPEKYKEIFFDQSKNGYAGYIDGGASQEEFYKFIKPILEKMDGTEELLVKLNREDLLRKQRTFDNGSIPHQIHLGELHAILRRQEDFYPFLKDNREKIEKILTFRIPYYVGPLARGNSRFAWMTRKSEETITPWNFEEVVDKGASAQSFIERMTNFDKNLPNEKVLPKHSLLYEYFTVYNELTKVKYVTEGMRKPAFLSGEQKKAIVDLLFKTNRKVTVKQLKEDYFKKIECFDSVEISGVEDRFNASLGTYHDLLKIIKDKDFLDNEENEDILEDIVLTLTLFEDREMIEERLKTYAHLFDDKVMKQLKRRRYTGWGRLSRKLINGIRDKQSGKTILDFLKSDGFANRNFMQLIHDDSLTFKEDIQKAQVSGQGDSLHEHIANLAGSPAIKKGILQTVKVVDELVKVMGRHKPENIVIEMARENQTTQKGQKNSRERMKRIEEGIKELGSQILKEHPVENTQLQNEKLYLYYLQNGRDMYVDQELDINRLSDYDVDHIVPQSFLKDDSIDNKVLTRSDKARGKSDNVPSEEVVKKMKNYWRQLLNAKLITQRKFDNLTKAERGGLSELDKAGFIKRQLVETRQITKHVAQILDSRMNTKYDENDKLIREVKVITLKSKLVSDFRKDFQFYKVREINNYHHAHDAYLNAVVGTALIKKYPKLESEFVYGDYKVYDVRKMIAKSEQEIGKATAKYFFYSNIMNFFKTEITLANGEIRKRPLIETNGETGEIVWDKGRDFATVRKVLSMPQVNIVKKTEVQTGGFSKESILPKRNSDKLIARKKDWDPKKYGGFDSPTVAYSVLVVAKVEKGKSKKLKSVKELLGITIMERSSFEKNPIDFLEAKGYKEVKKDLIIKLPKYSLFELENGRKRMLASAGELQKGNELALPSKYVNFLYLASHYEKLKGSPEDNEQKQLFVEQHKHYLDEIIEQISEFSKRVILADANLDKVLSAYNKHRDKPIREQAENIIHLFTLTNLGAPAAFKYFDTTIDRKRYTSTKEVLDATLIHQSITGLYETRIDLSQLGGDGGGGSEAAAKGSSGGVLNLEEEYRLHEKPVPSSIDPSWLQLFPTVWAERAGMGLANQVPPVVVELRSGASPVAVRQYPMSKEAREGIRPHIQRFLDLGVLVPCQSPWNTPLLPVKKPGTNDYRPVQDLREINKRVQDIHPTVPNPYNLLSSLPPSHTWYSVLDLKDAFFCLKLHPNSQPLFAFEWRDPEKGNTGQLTWTRLPQGFKNSPTLFNEALHRDLAPFRALNPQVVLLQYVDDLLVAAPTYRDCKEGTQKLLQELSKLGYRVSAKKAQLCQKEVTYLGYLLKEGKRWLTPARKATVMKIPPPTTPRQVREFLGTAGFCRLWIPGFASLAAPLYPLTKPSIPFIWTEEHQKAFDRIKEALLSAPALALPDLTKPFTLYVDERAGVARGVLTQTLGPWRRPVAYLSKKLDPVASGWPTCLKAVAAVALLLKDADKLTLGQNVTVIASHSLESIVRQPPDRWMTNARMTHYQSLLLNERVSFAPPAVLNPATLLPVESEATPVHRCSEILAEETGTRRDLKDQPLPGVPAWYTDGSSFIAEGKRRAGAAIVDGKRTVWASSLPEGTSAQKAELVALTQALRLAEGKDINIYTDSRYAFATAHIHGAIYKQRGWLTSAGKDIKNKEEILALLEAIHLPKRVAIIHCPGHQKGNDPVATGNRRADEAAKQAALSTRVLAETTKPAGKRTADGSEFEKRTADGSEFESPKKKAKVE

SEQ ID NO: 7065 - protein, 2094 aa, synthetic construct
MPAAKRVKLDGGDKKYSIGLDIGTNSVGWAVITDEYKVPSKKFKVLGNTDRHSIKKNLIGALLFDSGETAEATRLKRTARRRYTRRKNRICYLQEIFSNEMAKVDDSFFHRLEESFLVEEDKKHERHPIFGNIVDEVAYHEKYPTIYHLRKKLVDSTDKADLRLIYLALAHMIKFRGHFLIEGDLNPDNSDVDKLFIQLVQTYNQLFEENPINASGVDAKAILSARLSKSRRLENLIAQLPGEKKNGLFGNLIALSLGLTPNFKSNFDLAEDAKLQLSKDTYDDDLDNLLAQIGDQYADLFLAAKNLSDAILLSDILRVNTEITKAPLSASMIKRYDEHHQDLTLLKALVRQQLPEKYKEIFFDQSKNGYAGYIDGGASQEEFYKFIKPILEKMDGTEELLVKLNREDLLRKQRTFDNGSIPHQIHLGELHAILRRQEDFYPFLKDNREKIEKILTFRIPYYVGPLARGNSRFAWMTRKSEETITPWNFEEVVDKGASAQSFIERMTNFDKNLPNEKVLPKHSLLYEYFTVYNELTKVKYVTEGMRKPAFLSGEQKKAIVDLLFKTNRKVTVKQLKEDYFKKIECFDSVEISGVEDRFNASLGTYHDLLKIIKDKDFLDNEENEDILEDIVLTLTLFEDREMIEERLKTYAHLFDDKVMKQLKRRRYTGWGRLSRKLINGIRDKQSGKTILDFLKSDGFANRNFMQLIHDDSLTFKEDIQKAQVSGQGDSLHEHIANLAGSPAIKKGILQTVKVVDELVKVMGRHKPENIVIEMARENQTTQKGQKNSRERMKRIEEGIKELGSQILKEHPVENTQLQNEKLYLYYLQNGRDMYVDQELDINRLSDYDVDHIVPQSFLKDDSIDNKVLTRSDKARGKSDNVPSEEVVKKMKNYWRQLLNAKLITQRKFDNLTKAERGGLSELDKAGFIKRQLVETRQITKHVAQILDSRMNTKYDENDKLIREVKVITLKSKLVSDFRKDFQFYKVREINNYHHAHDAYLNAVVGTALIKKYPKLESEFVYGDYKVYDVRKMIAKSEQEIGKATAKYFFYSNIMNFFKTEITLANGEIRKRPLIETNGETGEIVWDKGRDFATVRKVLSMPQVNIVKKTEVQTGGFSKESILPKRNSDKLIARKKDWDPKKYGGFDSPTVAYSVLVVAKVEKGKSKKLKSVKELLGITIMERSSFEKNPIDFLEAKGYKEVKKDLIIKLPKYSLFELENGRKRMLASAGELQKGNELALPSKYVNFLYLASHYEKLKGSPEDNEQKQLFVEQHKHYLDEIIEQISEFSKRVILADANLDKVLSAYNKHRDKPIREQAENIIHLFTLTNLGAPAAFKYFDTTIDRKRYTSTKEVLDATLIHQSITGLYETRIDLSQLGGDGGGGSEAAAKGSSGGVLNLEEEYRLHEKPVPSSIDPSWLQLFPTVWAERAGMGLANQVPPVVVELRSGASPVAVRQYPMSKEAREGIRPHIQRFLDLGVLVPCQSPWNTPLLPVKKPGTNDYRPVQDLREINKRVQDIHPTVPNPYNLLSSLPPSHTWYSVLDLKDAFFCLKLHPNSQPLFAFEWRDPEKGNTGQLTWTRLPQGFKNSPTLFNEALHRDLAPFRALNPQVVLLQYVDDLLVAAPTYRDCKEGTQKLLQELSKLGYRVSAKKAQLCQKEVTYLGYLLKEGKRWLTPARKATVMKIPPPTTPRQVREFLGKAGFCRLFIPGFASLAAPLYPLTKPSIPFIWTEEHQKAFDRIKEALLSAPALALPDLTKPFTLYVDERAGVARGVLTQTLGPWRRPVAYLSKKLDPVASGWPTCLKAVAAVALLLKDADKLTLGQNVTVIASHSLESIVRQPPDRWMTNARMTHYQSLLLNERVSFAPPAVLNPATLLPVESEATPVHRCSEILAEETGTRRDLKDQPLPGVPAWYTDGSSFIAEGKRRAGAAIVDGKRTVWASSLPEGTSAQKAELVALTQALRLAEGKDINIYTDSRYAFATAHIHGAIYKQRGWLTSAGKDIKNKEEILALLEAIHLPKRVAIIHCPGHQKGNDPVATGNRRADEAAKQAALSTRVLAETTKPAGKRTADGSEFEKRTADGSEFESPKKKAKVE

SEQ ID NO: 7066 - protein, 2096 aa, synthetic construct
MPAAKRVKLDGGDKKYSIGLDIGTNSVGWAVITDEYKVPSKKFKVLGNTDRHSIKKNLIGALLFDSGETAEATRLKRTARRRYTRRKNRICYLQEIFSNEMAKVDDSFFHRLEESFLVEEDKKHERHPIFGNIVDEVAYHEKYPTIYHLRKKLVDSTDKADLRLIYLALAHMIKFRGHFLIEGDLNPDNSDVDKLFIQLVQTYNQLFEENPINASGVDAKAILSARLSKSRRLENLIAQLPGEKKNGLFGNLIALSLGLTPNFKSNFDLAEDAKLQLSKDTYDDDLDNLLAQIGDQYADLFLAAKNLSDAILLSDILRVNTEITKAPLSASMIKRYDEHHQDLTLLKALVRQQLPEKYKEIFFDQSKNGYAGYIDGGASQEEFYKFIKPILEKMDGTEELLVKLNREDLLRKQRTFDNGSIPHQIHLGELHAILRRQEDFYPFLKDNREKIEKILTFRIPYYVGPLARGNSRFAWMTRKSEETITPWNFEEVVDKGASAQSFIERMTNFDKNLPNEKVLPKHSLLYEYFTVYNELTKVKYVTEGMRKPAFLSGEQKKAIVDLLFKTNRKVTVKQLKEDYFKKIECFDSVEISGVEDRFNASLGTYHDLLKIIKDKDFLDNEENEDILEDIVLTLTLFEDREMIEERLKTYAHLFDDKVMKQLKRRRYTGWGRLSRKLINGIRDKQSGKTILDFLKSDGFANRNFMQLIHDDSLTFKEDIQKAQVSGQGDSLHEHIANLAGSPAIKKGILQTVKVVDELVKVMGRHKPENIVIEMARENQTTQKGQKNSRERMKRIEEGIKELGSQILKEHPVENTQLQNEKLYLYYLQNGRDMYVDQELDINRLSDYDVDHIVPQSFLKDDSIDNKVLTRSDKARGKSDNVPSEEVVKKMKNYWRQLLNAKLITQRKFDNLTKAERGGLSELDKAGFIKRQLVETRQITKHVAQILDSRMNTKYDENDKLIREVKVITLKSKLVSDFRKDFQFYKVREINNYHHAHDAYLNAVVGTALIKKYPKLESEFVYGDYKVYDVRKMIAKSEQEIGKATAKYFFYSNIMNFFKTEITLANGEIRKRPLIETNGETGEIVWDKGRDFATVRKVLSMPQVNIVKKTEVQTGGFSKESILPKRNSDKLIARKKDWDPKKYGGFDSPTVAYSVLVVAKVEKGKSKKLKSVKELLGITIMERSSFEKNPIDFLEAKGYKEVKKDLIIKLPKYSLFELENGRKRMLASAGELQKGNELALPSKYVNFLYLASHYEKLKGSPEDNEQKQLFVEQHKHYLDEIIEQISEFSKRVILADANLDKVLSAYNKHRDKPIREQAENIIHLFTLTNLGAPAAFKYFDTTIDRKRYTSTKEVLDATLIHQSITGLYETRIDLSQLGGDGGGGSEAAAKGSSGGTLNIEDEYRLHETSKEPDVPLGSTWLSDFPQAWAETGGMGLAVRQAPLIIPLKATSTPVSIKQYPMSQEARLGIKPHIQRLLDQGILVPCQSPWNTPLLPVKKPGTNDYRPVQDLREVNKRVEDIHPTVPNPYNLLSGLPPSHQWYTVLDLKDAFFCLRLHPTSQPLFAFEWRDPEMGISGQLTWTRLPQGFKNSPTLFNEALHRDLADFRIQHPDLILLQYVDDLLLAATSEQDCQRGTRALLQTLGNLGYRASAKKAQICQKQVKYLGYLLKEGQRWLTEARKETVMGQPTPKTPRQLREFLGTAGFCRLWIPGFAEMAAPLYPLTKPGTLFNWGPDQQKAYQEIKQALLTAPALGLPDLTKPFELFVDEKQGYAKGVLTQKLGPWRRPVAYLSKKLDPVAAGWPPCLRMVAAIAVLTKDAGKLTMGQPLVILAPHAVEALVKQPPDRWLSNARMTHYQAMLLDTDRVQFGPVVALNPATLLPLPEKEAPHDCLEILAETHGTRPDLTDQPIPDADYTWYTDGSSFLQEGQRRAGAAVTTETEVIWARALPAGTSAQRAELIALTQALKMAEGKKLNVYTDSRYAFATAHVHGEIYRRRGWLTSEGREIKNKNEILALLKALFLPKRLSIIHCPGHQKGNSAEARGNRMADQAAREAAMKAVLETSTLLAGKRTADGSEFEKRTADGSEFESPKKKAKVE

SEQ ID NO: 7067 - protein, 2096 aa, synthetic construct; identical to SEQ ID NO: 4522

SEQ ID NO: 7068 - protein, 2098 aa, synthetic construct
MPAAKRVKLDGGDKKYSIGLDIGTNSVGWAVITDEYKVPSKKFKVLGNTDRHSIKKNLIGALLFDSGETAEATRLKRTARRRYTRRKNRICYLQEIFSNEMAKVDDSFFHRLEESFLVEEDKKHERHPIFGNIVDEVAYHEKYPTIYHLRKKLVDSTDKADLRLIYLALAHMIKFRGHFLIEGDLNPDNSDVDKLFIQLVQTYNQLFEENPINASGVDAKAILSARLSKSRRLENLIAQLPGEKKNGLFGNLIALSLGLTPNFKSNFDLAEDAKLQLSKDTYDDDLDNLLAQIGDQYADLFLAAKNLSDAILLSDILRVNTEITKAPLSASMIKRYDEHHQDLTLLKALVRQQLPEKYKEIFFDQSKNGYAGYIDGGASQEEFYKFIKPILEKMDGTEELLVKLNREDLLRKQRTFDNGSIPHQIHLGELHAILRRQEDFYPFLKDNREKIEKILTFRIPYYVGPLARGNSRFAWMTRKSEETITPWNFEEVVDKGASAQSFIERMTNFDKNLPNEKVLPKHSLLYEYFTVYNELTKVKYVTEGMRKPAFLSGEQKKAIVDLLFKTNRKVTVKQLKEDYFKKIECFDSVEISGVEDRFNASLGTYHDLLKIIKDKDFLDNEENEDILEDIVLTLTLFEDREMIEERLKTYAHLFDDKVMKQLKRRRYTGWGRLSRKLINGIRDKQSGKTILDFLKSDGFANRNFMQLIHDDSLTFKEDIQKAQVSGQGDSLHEHIANLAGSPAIKKGILQTVKVVDELVKVMGRHKPENIVIEMARENQTTQKGQKNSRERMKRIEEGIKELGSQILKEHPVENTQLQNEKLYLYYLQNGRDMYVDQELDINRLSDYDVDHIVPQSFLKDDSIDNKVLTRSDKARGKSDNVPSEEVVKKMKNYWRQLLNAKLITQRKFDNLTKAERGGLSELDKAGFIKRQLVETRQITKHVAQILDSRMNTKYDENDKLIREVKVITLKSKLVSDFRKDFQFYKVREINNYHHAHDAYLNAVVGTALIKKYPKLESEFVYGDYKVYDVRKMIAKSEQEIGKATAKYFFYSNIMNFFKTEITLANGEIRKRPLIETNGETGEIVWDKGRDFATVRKVLSMPQVNIVKKTEVQTGGFSKESILPKRNSDKLIARKKDWDPKKYGGFDSPTVAYSVLVVAKVEKGKSKKLKSVKELLGITIMERSSFEKNPIDFLEAKGYKEVKKDLIIKLPKYSLFELENGRKRMLASAGELQKGNELALPSKYVNFLYLASHYEKLKGSPEDNEQKQLFVEQHKHYLDEIIEQISEFSKRVILADANLDKVLSAYNKHRDKPIREQAENIIHLFTLTNLGAPAAFKYFDTTIDRKRYTSTKEVLDATLIHQSITGLYETRIDLSQLGGDGGGSSGGSEAAAKGGTAPLEEEYRLFLEAPIQNVTLLEQWKREIPKVWAEINPPGLASTQAPIHVQLLSTALPVRVRQYPITLEAKRSLRETIRKFRAAGILRPVHSPWNTPLLPVRKSGTSEYRMVQDLREVNKRVETIHPTVPNPYTLLSLLPPDRIWYSVLDLKDAFFCIPLAPESQLIFAFEWADAEEGESGQLTWTRLPQGFKNSPTLFNEALNRDLQGFRLDHPSVSLLQYVDDLLIAADTQAACLSATRDLLMTLAELGYRVSGKKAQLCQEEVTYLGFKIHKGSRSLSNSRTQAILQIPVPKTKRQVREFLGTIGYCRLWIPGFAELAQPLYAATRPGNDPLVWGEKEEEAFQSLKLALTQPPALALPSLDKPFQLFVEETSGAAKGVLTQALGPWKRPVAYLSKRLDPVAAGWPRCLRAIAAAALLTREASKLTFGQDIEITSSHNLESLLRSPPDKWLTNARITQYQVLLLDPPRVRFKQTAALNPATLLPETDDTLPIHHCLDTLDSLTSTRPDLTDQPLAQAEATLFTDGSSYIRDGKRYAGAAVVTLDSVIWAEPLPIGTSAQKAELIALTKALEWSKDKSVNIYTDSRYAFATLHVHGMIYRERGWLTAGGKAIKNAPEILALLTAVWLPKRVAVMHCKGHQKDDAPTSTGNRRADEVAREVAIRPLSTQATISAGKRTADGSEFEKRTADGSEFESPKKKAKVE

SEQ ID NO: 7069 - protein, 2098 aa, synthetic construct
MPAAKRVKLDGGDKKYSIGLDIGTNSVGWAVITDEYKVPSKKFKVLGNTDRHSIKKNLIGALLFDSGETAEATRLKRTARRRYTRRKNRICYLQEIFSNEMAKVDDSFFHRLEESFLVEEDKKHERHPIFGNIVDEVAYHEKYPTIYHLRKKLVDSTDKADLRLIYLALAHMIKFRGHFLIEGDLNPDNSDVDKLFIQLVQTYNQLFEENPINASGVDAKAILSARLSKSRRLENLIAQLPGEKKNGLFGNLIALSLGLTPNFKSNFDLAEDAKLQLSKDTYDDDLDNLLAQIGDQYADLFLAAKNLSDAILLSDILRVNTEITKAPLSASMIKRYDEHHQDLTLLKALVRQQLPEKYKEIFFDQSKNGYAGYIDGGASQEEFYKFIKPILEKMDGTEELLVKLNREDLLRKQRTFDNGSIPHQIHLGELHAILRRQEDFYPFLKDNREKIEKILTFRIPYYVGPLARGNSRFAWMTRKSEETITPWNFEEVVDKGASAQSFIERMTNFDKNLPNEKVLPKHSLLYEYFTVYNELTKVKYVTEGMRKPAFLSGEQKKAIVDLLFKTNRKVTVKQLKEDYFKKIECFDSVEISGVEDRFNASLGTYHDLLKIIKDKDFLDNEENEDILEDIVLTLTLFEDREMIEERLKTYAHLFDDKVMKQLKRRRYTGWGRLSRKLINGIRDKQSGKTILDFLKSDGFANRNFMQLIHDDSLTFKEDIQKAQVSGQGDSLHEHIANLAGSPAIKKGILQTVKVVDELVKVMGRHKPENIVIEMARENQTTQKGQKNSRERMKRIEEGIKELGSQILKEHPVENTQLQNEKLYLYYLQNGRDMYVDQELDINRLSDYDVDHIVPQSFLKDDSIDNKVLTRSDKARGKSDNVPSEEVVKKMKNYWRQLLNAKLITQRKFDNLTKAERGGLSELDKAGFIKRQLVETRQITKHVAQILDSRMNTKYDENDKLIREVKVITLKSKLVSDFRKDFQFYKVREINNYHHAHDAYLNAVVGTALIKKYPKLESEFVYGDYKVYDVRKMIAKSEQEIGKATAKYFFYSNIMNFFKTEITLANGEIRKRPLIETNGETGEIVWDKGRDFATVRKVLSMPQVNIVKKTEVQTGGFSKESILPKRNSDKLIARKKDWDPKKYGGFDSPTVAYSVLVVAKVEKGKSKKLKSVKELLGITIMERSSFEKNPIDFLEAKGYKEVKKDLIIKLPKYSLFELENGRKRMLASAGELQKGNELALPSKYVNFLYLASHYEKLKGSPEDNEQKQLFVEQHKHYLDEIIEQISEFSKRVILADANLDKVLSAYNKHRDKPIREQAENIIHLFTLTNLGAPAAFKYFDTTIDRKRYTSTKEVLDATLIHQSITGLYETRIDLSQLGGDGGGSSGGSEAAAKGGTAPLEEEYRLFLEAPIQNVTLLEQWKREIPKVWAEINPPGLASTQAPIHVQLLSTALPVRVRQYPITLEAKRSLRETIRKFRAAGILRPVHSPWNTPLLPVRKSGTSEYRMVQDLREVNKRVETIHPTVPNPYTLLSLLPPDRIWYSVLDLKDAFFCIPLAPESQLIFAFEWADAEEGESGQLTWTRLPQGFKNSPTLFNEALNRDLQGFRLDHPSVSLLQYVDDLLIAADTQAACLSATRDLLMTLAELGYRVSGKKAQLCQEEVTYLGFKIHKGSRSLSNSRTQAILQIPVPKTKRQVREFLGKIGYCRLFIPGFAELAQPLYAATRPGNDPLVWGEKEEEAFQSLKLALTQPPALALPSLDKPFQLFVEETSGAAKGVLTQALGPWKRPVAYLSKRLDPVAAGWPRCLRAIAAAALLTREASKLTFGQDIEITSSHNLESLLRSPPDKWLTNARITQYQVLLLDPPRVRFKQTAALNPATLLPETDDTLPIHHCLDTLDSLTSTRPDLTDQPLAQAEATLFTDGSSYIRDGKRYAGAAVVTLDSVIWAEPLPIGTSAQKAELIALTKALEWSKDKSVNIYTDSRYAFATLHVHGMIYRERGWLTAGGKAIKNAPEILALLTAVWLPKRVAVMHCKGHQKDDAPTSTGNRRADEVAREVAIRPLSTQATISAGKRTADGSEFEKRTADGSEFESPKKKAKVE

SEQ ID NO: 7070 - protein, 2095 aa, synthetic construct
MPAAKRVKLDGGDKKYSIGLDIGTNSVGWAVITDEYKVPSKKFKVLGNTDRHSIKKNLIGALLFDSGETAEATRLKRTARRRYTRRKNRICYLQEIFSNEMAKVDDSFFHRLEESFLVEEDKKHERHPIFGNIVDEVAYHEKYPTIYHLRKKLVDSTDKADLRLIYLALAHMIKFRGHFLIEGDLNPDNSDVDKLFIQLVQTYNQLFEENPINASGVDAKAILSARLSKSRRLENLIAQLPGEKKNGLFGNLIALSLGLTPNFKSNFDLAEDAKLQLSKDTYDDDLDNLLAQIGDQYADLFLAAKNLSDAILLSDILRVNTEITKAPLSASMIKRYDEHHQDLTLLKALVRQQLPEKYKEIFFDQSKNGYAGYIDGGASQEEFYKFIKPILEKMDGTEELLVKLNREDLLRKQRTFDNGSIPHQIHLGELHAILRRQEDFYPFLKDNREKIEKILTFRIPYYVGPLARGNSRFAWMTRKSEETITPWNFEEVVDKGASAQSFIERMTNFDKNLPNEKVLPKHSLLYEYFTVYNELTKVKYVTEGMRKPAFLSGEQKKAIVDLLFKTNRKVTVKQLKEDYFKKIECFDSVEISGVEDRFNASLGTYHDLLKIIKDKDFLDNEENEDILEDIVLTLTLFEDREMIEERLKTYAHLFDDKVMKQLKRRRYTGWGRLSRKLINGIRDKQSGKTILDFLKSDGFANRNFMQLIHDDSLTFKEDIQKAQVSGQGDSLHEHIANLAGSPAIKKGILQTVKVVDELVKVMGRHKPENIVIEMARENQTTQKGQKNSRERMKRIEEGIKELGSQILKEHPVENTQLQNEKLYLYYLQNGRDMYVDQELDINRLSDYDVDHIVPQSFLKDDSIDNKVLTRSDKARGKSDNVPSEEVVKKMKNYWRQLLNAKLITQRKFDNLTKAERGGLSELDKAGFIKRQLVETRQITKHVAQILDSRMNTKYDENDKLIREVKVITLKSKLVSDFRKDFQFYKVREINNYHHAHDAYLNAVVGTALIKKYPKLESEFVYGDYKVYDVRKMIAKSEQEIGKATAKYFFYSNIMNFFKTEITLANGEIRKRPLIETNGETGEIVWDKGRDFATVRKVLSMPQVNIVKKTEVQTGGFSKESILPKRNSDKLIARKKDWDPKKYGGFDSPTVAYSVLVVAKVEKGKSKKLKSVKELLGITIMERSSFEKNPIDFLEAKGYKEVKKDLIIKLPKYSLFELENGRKRMLASAGELQKGNELALPSKYVNFLYLASHYEKLKGSPEDNEQKQLFVEQHKHYLDEIIEQISEFSKRVILADANLDKVLSAYNKHRDKPIREQAENIIHLFTLTNLGAPAAFKYFDTTIDRKRYTSTKEVLDATLIHQSITGLYETRIDLSQLGGDGGGSSGGSEAAAKGGTLQLEEEYRLFEPESTQKQEMDIWLKNFPQAWAETGGMGTAHCQAPVLIQLKATATPISIRQYPMPHEAYQGIKPHIRRMLDQGILKPCQSPWNTPLLPVKKPGTEDYRPVQDLREVNKRVEDIHPTVPNPYNLLSTLPPSHPWYTVLDLKDAFFCLRLHSESQLLFAFEWRDPEIGLSGQLTWTRLPQGFKNSPTLFNEALHSDLADFRVRYPALVLLQYVDDLLLAAATRTECLEGTKALLETLGNKGYRASAKKAQICLQEVTYLGYSLKDGQRWLTKARKEAILSIPVPKNSRQVREFLGTAGYCRLWIPGFAELAAPLYPLTRPGTLFQWGTEQQLAFEDIKKALLSSPALGLPDITKPFELFIDENSGFAKGVLVQKLGPWKRPVAYLSKKLDTVASGWPPCLRMVAAIAILVKDAGKLTLGQPLTILTSHPVEALVRQPPNKWLSNARMTHYQAMLLDAERVHFGPTVSLNPATLLPLPSGGNHHDCLQILAETHGTRPDLTDQPLPDADLTWYTDGSSFIRNGEREAGAAVTTESEVIWAAPLPPGTSAQRAELIALTQALKMAEGKKLTVYTDSRYAFATTHVHGEIYRRRGWLTSEGKEIKNKNEILALLEALFLPKRLSIIHCPGHQKGDSPQAKGNRLADDTAKKAATETHSSLTVLPAGKRTADGSEFEKRTADGSEFESPKKKAKVE

SEQ ID NO: 7071 - protein, 2094 aa, synthetic construct
MPAAKRVKLDGGDKKYSIGLDIGTNSVGWAVITDEYKVPSKKFKVLGNTDRHSIKKNLIGALLFDSGETAEATRLKRTARRRYTRRKNRICYLQEIFSNEMAKVDDSFFHRLEESFLVEEDKKHERHPIFGNIVDEVAYHEKYPTIYHLRKKLVDSTDKADLRLIYLALAHMIKFRGHFLIEGDLNPDNSDVDKLFIQLVQTYNQLFEENPINASGVDAKAILSARLSKSRRLENLIAQLPGEKKNGLFGNLIALSLGLTPNFKSNFDLAEDAKLQLSKDTYDDDLDNLLAQIGDQYADLFLAAKNLSDAILLSDILRVNTEITKAPLSASMIKRYDEHHQDLTLLKALVRQQLPEKYKEIFFDQSKNGYAGYIDGGASQEEFYKFIKPILEKMDGTEELLVKLNREDLLRKQRTFDNGSIPHQIHLGELHAILRRQEDFYPFLKDNREKIEKILTFRIPYYVGPLARGNSRFAWMTRKSEETITPWNFEEVVDKGASAQSFIERMTNFDKNLPNEKVLPKHSLLYEYFTVYNELTKVKYVTEGMRKPAFLSGEQKKAIVDLLFKTNRKVTVKQLKEDYFKKIECFDSVEISGVEDRFNASLGTYHDLLKIIKDKDFLDNEENEDILEDIVLTLTLFEDREMIEERLKTYAHLFDDKVMKQLKRRRYTGWGRLSRKLINGIRDKQSGKTILDFLKSDGFANRNFMQLIHDDSLTFKEDIQKAQVSGQGDSLHEHIANLAGSPAIKKGILQTVKVVDELVKVMGRHKPENIVIEMARENQTTQKGQKNSRERMKRIEEGIKELGSQILKEHPVENTQLQNEKLYLYYLQNGRDMYVDQELDINRLSDYDVDHIVPQSFLKDDSIDNKVLTRSDKARGKSDNVPSEEVVKKMKNYWRQLLNAKLITQRKFDNLTKAERGGLSELDKAGFIKRQLVETRQITKHVAQILDSRMNTKYDENDKLIREVKVITLKSKLVSDFRKDFQFYKVREINNYHHAHDAYLNAVVGTALIKKYPKLESEFVYGDYKVYDVRKMIAKSEQEIGKATAKYFFYSNIMNFFKTEITLANGEIRKRPLIETNGETGEIVWDKGRDFATVRKVLSMPQVNIVKKTEVQTGGFSKESILPKRNSDKLIARKKDWDPKKYGGFDSPTVAYSVLVVAKVEKGKSKKLKSVKELLGITIMERSSFEKNPIDFLEAKGYKEVKKDLIIKLPKYSLFELENGRKRMLASAGELQKGNELALPSKYVNFLYLASHYEKLKGSPEDNEQKQLFVEQHKHYLDEIIEQISEFSKRVILADANLDKVLSAYNKHRDKPIREQAENIIHLFTLTNLGAPAAFKYFDTTIDRKRYTSTKEVLDATLIHQSITGLYETRIDLSQLGGDGGGSSGGSEAAAKGGVLNLEEEYRLHEKPVPSSIDPSWLQLFPTVWAERAGMGLANQVPPVVVELRSGASPVAVRQYPMSKEAREGIRPHIQKFLDLGVLVPCRSPWNTPLLPVKKPGTNDYRPVQDLREINKRVQDIHPTVPNPYNLLSSLPPSYTWYSVLDLKDAFFCLRLHPNSQPLFAFEWKDPEKGNTGQLTWTRLPQGFKNSPTLFNEALHRDLAPFRALNPQVVLLQYVDDLLVAAPTYEDCKKGTQKLLQELSKLGYRVSAKKAQLCQREVTYLGYLLKEGKRWLTPARKATVMKIPVPTTPRQVREFLGKAGFCRLFIPGFASLAAPLYPLTKPSIPFIWTEEHQQAFDHIKKALLSAPALALPDLTKPFTLYIDERAGVARGVLTQTLGPWRRPVAYLSKKLDPVASGWPTCLKAVAAVALLLKDADKLTLGQNVTVIASHSLESIVRQPPDRWMTNARMTHYQSLLLNERVSFAPPAVLNPATLLPVESEATPVHRCSEILAEETGTRRDLEDQPLPGVPTWYTDGSSFITEGKRRAGAPIVDGKRTVWASSLPEGTSAQKAELVALTQALRLAEGKNINIYTDSRYAFATAHIHGAIYKQRGWLTSAGKDIKNKEEILALLEAIHLPRRVAIIHCPGHQRGSNPVATGNRRADEAAKQAALSTRVLAGTTKPAGKRTADGSEFEKRTADGSEFESPKKKAKVE

SEQ ID NO: 7072 - protein, 2127 aa, synthetic construct
MPAAKRVKLDGGDKKYSIGLDIGTNSVGWAVITDEYKVPSKKFKVLGNTDRHSIKKNLIGALLFDSGETAEATRLKRTARRRYTRRKNRICYLQEIFSNEMAKVDDSFFHRLEESFLVEEDKKHERHPIFGNIVDEVAYHEKYPTIYHLRKKLVDSTDKADLRLIYLALAHMIKFRGHFLIEGDLNPDNSDVDKLFIQLVQTYNQLFEENPINASGVDAKAILSARLSKSRRLENLIAQLPGEKKNGLFGNLIALSLGLTPNFKSNFDLAEDAKLQLSKDTYDDDLDNLLAQIGDQYADLFLAAKNLSDAILLSDILRVNTEITKAPLSASMIKRYDEHHQDLTLLKALVRQQLPEKYKEIFFDQSKNGYAGYIDGGASQEEFYKFIKPILEKMDGTEELLVKLNREDLLRKQRTFDNGSIPHQIHLGELHAILRRQEDFYPFLKDNREKIEKILTFRIPYYVGPLARGNSRFAWMTRKSEETITPWNFEEVVDKGASAQSFIERMTNFDKNLPNEKVLPKHSLLYEYFTVYNELTKVKYVTEGMRKPAFLSGEQKKAIVDLLFKTNRKVTVKQLKEDYFKKIECFDSVEISGVEDRFNASLGTYHDLLKIIKDKDFLDNEENEDILEDIVLTLTLFEDREMIEERLKTYAHLFDDKVMKQLKRRRYTGWGRLSRKLINGIRDKQSGKTILDFLKSDGFANRNFMQLIHDDSLTFKEDIQKAQVSGQGDSLHEHIANLAGSPAIKKGILQTVKVVDELVKVMGRHKPENIVIEMARENQTTQKGQKNSRERMKRIEEGIKELGSQILKEHPVENTQLQNEKLYLYYLQNGRDMYVDQELDINRLSDYDVDHIVPQSFLKDDSIDNKVLTRSDKARGKSDNVPSEEVVKKMKNYWRQLLNAKLITQRKFDNLTKAERGGLSELDKAGFIKRQLVETRQITKHVAQILDSRMNTKYDENDKLIREVKVITLKSKLVSDFRKDFQFYKVREINNYHHAHDAYLNAVVGTALIKKYPKLESEFVYGDYKVYDVRKMIAKSEQEIGKATAKYFFYSNIMNFFKTEITLANGEIRKRPLIETNGETGEIVWDKGRDFATVRKVLSMPQVNIVKKTEVQTGGFSKESILPKRNSDKLIARKKDWDPKKYGGFDSPTVAYSVLVVAKVEKGKSKKLKSVKELLGITIMERSSFEKNPIDFLEAKGYKEVKKDLIIKLPKYSLFELENGRKRMLASAGELQKGNELALPSKYVNFLYLASHYEKLKGSPEDNEQKQLFVEQHKHYLDEIIEQISEFSKRVILADANLDKVLSAYNKHRDKPIREQAENIIHLFTLTNLGAPAAFKYFDTTIDRKRYTSTKEVLDATLIHQSITGLYETRIDLSQLGGDGGGSSGGSEAAAKGGLLGRDLLTKLKAQIQFSTEGPQVTWEDRPAMCLVLNLEEEYRLHEKPVPPSIDPSWLQLFPMVWAEKAGMGLANQVPPVVVELKSDASPVAVRQYPMSKEAREGIRPHIQRFLDLGILVPCQSPWNTPLLPVKKPGTNDYRPVQDLREVNKRVQDIHPTVPNPYNLLSSLPPSHTWYSVLDLKDAFFCLKLHPNSQPLFAFEWRDPEKGNTGQLTWTRLPQGFKNSPTLFNEALHRDLASFRALNPQVVMLQYVDDLLVAAPTYRDCKEGTRRLLQELSKLGYRVSAKKAQLCREEVTYLGYLLKGGKRWLTPARKATVMKIPTPTTPRQVREFLGTAGFCRLWIPGFASLAAPLYPLTRPKVPFTWTEAHQEAFGRIKEALLSAPALALPDLTKPFALYVDEKEGVARGVLTQTLGPWRRPVAYLSKKLDPVASGWPTCLKAIAAVALLLKDADKLTLGQNVLVIAPHNLESIVRQPPDRWMTNARMTHYQSLLLNERVSFAPPAILNPATLLPVESDDTPIHICSEILAEETGTRPDLRDQPLPGVPAWYTDGSSFIMDGRRQAGAAIVDNKRTVWASNLPEGTSAQKAELIALTQALRLAEGKSINIYTDSRYAFATAHVHGAIYKQRGWLTSAGKDIKNKEEILALLEAIHLPKRVAIIHCPGHQRGTDPVATGNRKADEAAKQAAQSTRILTETTKNAGKRTADGSEFEKRTADGSEFESPKKKAKVE

SEQ ID NO: 7073 - protein, 2218 aa, synthetic construct
MPAAKRVKLDGGDKKYSIGLDIGTNSVGWAVITDEYKVPSKKFKVLGNTDRHSIKKNLIGALLFDSGETAEATRLKRTARRRYTRRKNRICYLQEIFSNEMAKVDDSFFHRLEESFLVEEDKKHERHPIFGNIVDEVAYHEKYPTIYHLRKKLVDSTDKADLRLIYLALAHMIKFRGHFLIEGDLNPDNSDVDKLFIQLVQTYNQLFEENPINASGVDAKAILSARLSKSRRLENLIAQLPGEKKNGLFGNLIALSLGLTPNFKSNFDLAEDAKLQLSKDTYDDDLDNLLAQIGDQYADLFLAAKNLSDAILLSDILRVNTEITKAPLSASMIKRYDEHHQDLTLLKALVRQQLPEKYKEIFFDQSKNGYAGYIDGGASQEEFYKFIKPILEKMDGTEELLVKLNREDLLRKQRTFDNGSIPHQIHLGELHAILRRQEDFYPFLKDNREKIEKILTFRIPYYVGPLARGNSRFAWMTRKSEETITPWNFEEVVDKGASAQSFIERMTNFDKNLPNEKVLPKHSLLYEYFTVYNELTKVKYVTEGMRKPAFLSGEQKKAIVDLLFKTNRKVTVKQLKEDYFKKIECFDSVEISGVEDRFNASLGTYHDLLKIIKDKDFLDNEENEDILEDIVLTLTLFEDREMIEERLKTYAHLFDDKVMKQLKRRRYTGWGRLSRKLINGIRDKQSGKTILDFLKSDGFANRNFMQLIHDDSLTFKEDIQKAQVSGQGDSLHEHIANLAGSPAIKKGILQTVKVVDELVKVMGRHKPENIVIEMARENQTTQKGQKNSRERMKRIEEGIKELGSQILKEHPVENTQLQNEKLYLYYLQNGRDMYVDQELDINRLSDYDVDHIVPQSFLKDDSIDNKVLTRSDKARGKSDNVPSEEVVKKMKNYWRQLLNAKLITQRKFDNLTKAERGGLSELDKAGFIKRQLVETRQITKHVAQILDSRMNTKYDENDKLIREVKVITLKSKLVSDFRKDFQFYKVREINNYHHAHDAYLNAVVGTALIKKYPKLESEFVYGDYKVYDVRKMIAKSEQEIGKATAKYFFYSNIMNFFKTEITLANGEIRKRPLIETNGETGEIVWDKGRDFATVRKVLSMPQVNIVKKTEVQTGGFSKESILPKRNSDKLIARKKDWDPKKYGGFDSPTVAYSVLVVAKVEKGKSKKLKSVKELLGITIMERSSFEKNPIDFLEAKGYKEVKKDLIIKLPKYSLFELENGRKRMLASAGELQKGNELALPSKYVNFLYLASHYEKLKGSPEDNEQKQLFVEQHKHYLDEIIEQISEFSKRVILADANLDKVLSAYNKHRDKPIREQAENIIHLFTLTNLGAPAAFKYFDTTIDRKRYTSTKEVLDATLIHQSITGLYETRIDLSQLGGDGGGSSGGSEAAAKGGTLGDQGSRGSDPLPEPRVTLTVEGIPTEFLVNTGAEHSVLTKPMGKMGSKRTVVAGATGSKVYPWTTKRLLKIGQKQVTHSFLVIPECPAPLLGRDLLTKLKAQIQFSTEGPQVTWEDRPAMCLVLNLEEEYRLHEKPVPPSIDPSWLQLFPMVWAEKAGMGLANQVPPVVVELKSDASPVAVRQYPMSKEAREGIRPHIQRFLDLGILVPCQSPWNTPLLPVKKPGTNDYRPVQDLREVNKRVQDIHPTVPNPYNLLSSLPPSHTWYSVLDLKDAFFCLKLHPNSQPLFAFEWRDPEKGNTGQLTWTRLPQGFKNSPTLFNEALHRDLASFRALNPQVVMLQYVDDLLVAAPTYRDCKEGTRRLLQELSKLGYRVSAKKAQLCREEVTYLGYLLKGGKRWLTPARKATVMKIPTPTTPRQVREFLGTAGFCRLWIPGFASLAAPLYPLTRPKVPFTWTEAHQEAFGRIKEALLSAPALALPDLTKPFALYVDEKEGVARGVLTQTLGPWRRPVAYLSKKLDPVASGWPTCLKAIAAVALLLKDADKLTLGQNVLVIAPHNLESIVRQPPDRWMTNARMTHYQSLLLNERVSFAPPAILNPATLLPVESDDTPIHICSEILAEETGTRPDLRDQPLPGVPAWYTDGSSFIMDGRRQAGAAIVDNKRTVWASNLPEGTSAQKAELIALTQALRLAEGKSINIYTDSRYAFATAHVHGAIYKQRGWLTSAGKDIKNKEEILALLEAIHLPKRVAIIHCPGHQRGTDPVATGNRKADEAAKQAAQSTRILTETTKNAGKRTADGSEFEKRTADGSEFESPKKKAKVE

SEQ ID NO: 7074 - protein, 2090 aa, synthetic construct
MPAAKRVKLDGGDKKYSIGLDIGTNSVGWAVITDEYKVPSKKFKVLGNTDRHSIKKNLIGALLFDSGETAEATRLKRTARRRYTRRKNRICYLQEIFSNEMAKVDDSFFHRLEESFLVEEDKKHERHPIFGNIVDEVAYHEKYPTIYHLRKKLVDSTDKADLRLIYLALAHMIKFRGHFLIEGDLNPDNSDVDKLFIQLVQTYNQLFEENPINASGVDAKAILSARLSKSRRLENLIAQLPGEKKNGLFGNLIALSLGLTPNFKSNFDLAEDAKLQLSKDTYDDDLDNLLAQIGDQYADLFLAAKNLSDAILLSDILRVNTEITKAPLSASMIKRYDEHHQDLTLLKALVRQQLPEKYKEIFFDQSKNGYAGYIDGGASQEEFYKFIKPILEKMDGTEELLVKLNREDLLRKQRTFDNGSIPHQIHLGELHAILRRQEDFYPFLKDNREKIEKILTFRIPYYVGPLARGNSRFAWMTRKSEETITPWNFEEVVDKGASAQSFIERMTNFDKNLPNEKVLPKHSLLYEYFTVYNELTKVKYVTEGMRKPAFLSGEQKKAIVDLLFKTNRKVTVKQLKEDYFKKIECFDSVEISGVEDRFNASLGTYHDLLKIIKDKDFLDNEENEDILEDIVLTLTLFEDREMIEERLKTYAHLFDDKVMKQLKRRRYTGWGRLSRKLINGIRDKQSGKTILDFLKSDGFANRNFMQLIHDDSLTFKEDIQKAQVSGQGDSLHEHIANLAGSPAIKKGILQTVKVVDELVKVMGRHKPENIVIEMARENQTTQKGQKNSRERMKRIEEGIKELGSQILKEHPVENTQLQNEKLYLYYLQNGRDMYVDQELDINRLSDYDVDHIVPQSFLKDDSIDNKVLTRSDKARGKSDNVPSEEVVKKMKNYWRQLLNAKLITQRKFDNLTKAERGGLSELDKAGFIKRQLVETRQITKHVAQILDSRMNTKYDENDKLIREVKVITLKSKLVSDFRKDFQFYKVREINNYHHAHDAYLNAVVGTALIKKYPKLESEFVYGDYKVYDVRKMIAKSEQEIGKATAKYFFYSNIMNFFKTEITLANGEIRKRPLIETNGETGEIVWDKGRDFATVRKVLSMPQVNIVKKTEVQTGGFSKESILPKRNSDKLIARKKDWDPKKYGGFDSPTVAYSVLVVAKVEKGKSKKLKSVKELLGITIMERSSFEKNPIDFLEAKGYKEVKKDLIIKLPKYSLFELENGRKRMLASAGELQKGNELALPSKYVNFLYLASHYEKLKGSPEDNEQKQLFVEQHKHYLDEIIEQISEFSKRVILADANLDKVLSAYNKHRDKPIREQAENIIHLFTLTNLGAPAAFKYFDTTIDRKRYTSTKEVLDATLIHQSITGLYETRIDLSQLGGDGGGSSGGSEAAAKGGTLQLDDEYRLYSPLVKPDQNIQFWLEQFPQAWAETAGMGLAKQVPPQVIQLKASATPVSVRQYPLSKEAQEGIRPHVQRLIQQGILVPVQSPWNTPLLPVRKPGTNDYRPVQDLREVNKRVQDIHPTVPNPYNLLCALPPQRSWYTVLDLKDAFFCLRLHPTSQPLFAFEWRDPGTGRTGQLTWTRLPQGFKNSPTIFDEALHRDLANFRIQHPQVTLLQYVDDLLLAGATKQDCLEGTKALLLELSDLGYRASAKKAQICRREVTYLGYSLRDGQRWLTEARKKTVVQIPAPTTAKQVREFLGTAGFCRLWIPGFATLAAPLYPLTKEKGEFSWAPEHQKAFDAIKKALLSAPALALPDVTKPFTLYVDERKGVARGVLTQTLGPWRRPVAYLSKKLDPVASGWPVCLKAIAAVAILVKDADKLTLGQNITVIAPHALENIVRQPPDRWMTNARMTHYQSLLLTERVTFAPPAALNPATLLPEETDEPVTHDCHQLLIEETGVRKDLTDIPLTGEVLTWFTDGSSYVVEGKRMAGAAVVDGTRTIWASSLPEGTSAQKAELMALTQALRLAEGKSINIYTDSRYAFATAHVHGAIYKQRGLLTSAGREIKNKEEILSLLEALHLPKRLAIIHCPGHQKAKDPISRGNQMADRVAKQAAQGVNLLAGKRTADGSEFEKRTADGSEFESPKKKAKVE

SEQ ID NO: 7075 - protein, 2090 aa, synthetic construct; identical to SEQ ID NO: 7074

SEQ ID NO: 7076 - protein, 2176 aa, synthetic construct
MPAAKRVKLDGGDKKYSIGLDIGTNSVGWAVITDEYKVPSKKFKVLGNTDRHSIKKNLIGALLFDSGETAEATRLKRTARRRYTRRKNRICYLQEIFSNEMAKVDDSFFHRLEESFLVEEDKKHERHPIFGNIVDEVAYHEKYPTIYHLRKKLVDSTDKADLRLIYLALAHMIKFRGHFLIEGDLNPDNSDVDKLFIQLVQTYNQLFEENPINASGVDAKAILSARLSKSRRLENLIAQLPGEKKNGLFGNLIALSLGLTPNFKSNFDLAEDAKLQLSKDTYDDDLDNLLAQIGDQYADLFLAAKNLSDAILLSDILRVNTEITKAPLSASMIKRYDEHHQDLTLLKALVRQQLPEKYKEIFFDQSKNGYAGYIDGGASQEEFYKFIKPILEKMDGTEELLVKLNREDLLRKQRTFDNGSIPHQIHLGELHAILRRQEDFYPFLKDNREKIEKILTFRIPYYVGPLARGNSRFAWMTRKSEETITPWNFEEVVDKGASAQSFIERMTNFDKNLPNEKVLPKHSLLYEYFTVYNELTKVKYVTEGMRKPAFLSGEQKKAIVDLLFKTNRKVTVKQLKEDYFKKIECFDSVEISGVEDRFNASLGTYHDLLKIIKDKDFLDNEENEDILEDIVLTLTLFEDREMIEERLKTYAHLFDDKVMKQLKRRRYTGWGRLSRKLINGIRDKQSGKTILDFLKSDGFANRNFMQLIHDDSLTFKEDIQKAQVSGQGDSLHEHIANLAGSPAIKKGILQTVKVVDELVKVMGRHKPENIVIEMARENQTTQKGQKNSRERMKRIEEGIKELGSQILKEHPVENTQLQNEKLYLYYLQNGRDMYVDQELDINRLSDYDVDHIVPQSFLKDDSIDNKVLTRSDKARGKSDNVPSEEVVKKMKNYWRQLLNAKLITQRKFDNLTKAERGGLSELDKAGFIKRQLVETRQITKHVAQILDSRMNTKYDENDKLIREVKVITLKSKLVSDFRKDFQFYKVREINNYHHAHDAYLNAVVGTALIKKYPKLESEFVYGDYKVYDVRKMIAKSEQEIGKATAKYFFYSNIMNFFKTEITLANGEIRKRPLIETNGETGEIVWDKGRDFATVRKVLSMPQVNIVKKTEVQTGGFSKESILPKRNSDKLIARKKDWDPKKYGGFDSPTVAYSVLVVAKVEKGKSKKLKSVKELLGITIMERSSFEKNPIDFLEAKGYKEVKKDLIIKLPKYSLFELENGRKRMLASAGELQKGNELALPSKYVNFLYLASHYEKLKGSPEDNEQKQLFVEQHKHYLDEIIEQISEFSKRVILADANLDKVLSAYNKHRDKPIREQAENIIHLFTLTNLGAPAAFKYFDTTIDRKRYTSTKEVLDATLIHQSITGLYETRIDLSQLGGDGGGSSGGSEAAAKGGMDPLQLLQPLEAEIKGTKLKAHWNSGATITCVPEAFLEDERPIQTMLIKTIHGEKQQDVYYLTFKVQGRKVEAEVLASPYDYILLNPSDVPWLMKKPLQLTVLVPLHEYQERLLQQTALPKEQKELLQKLFLKYDALWQHWENQVGHRRIKPHNIATGTLAPRPQKQYPINPKAKPSIQIVIDDLLKQGVLIQQNSTMNTPVYPVPKPDGKWRMVLDYREVNKTIPLIAAQNQHSAGILSSIYRGKYKTTLDLTNGFWAHPITPESYWLTAFTWQGKQYCWTRLPQGFLNSPALFNADVVDLLKEIPNVQAYVDDIYISHDDPQEHLEQLEKIFSILLNAGYVVSLKKSEIAQREVEFLGFNITKEGRGLTDTFKQKLLNITPPKDLKQLQSILGLLNFARNFIPNYSELVKPLYTIVAPANGKFISWTEDNSNQLQHIISVLNQADNLEERNPETRLIIKVNSSPSAGYIRYYNEGSKRPIMYVNYIFSKAEAKFTQTEKLLTTMHKGLIKAMDLAMGQEILVYSPIVSMTKIQRTPLPERKALPVRWITWMTYLEDPRIQFHYDKSLPELQQIPNVTEDVIAKTKHPSEFAMVFYTDGSAIKHPDVNKSHSAGMGIAQVQFIPEYKIVHQWSIPLGDHTAQLAEIAAVEFACKKALKISGPVLIVTDSFYVAESANKELPYWKSNGFLNNKKKPLRHVSKWKSIAECLQLKPDIIIMHEKGHQQPMTTLHTEGNNLADKLATQGSYVVHAGKRTADGSEFEKRTADGSEFESPKKKAKVE

SEQ ID NO: 7077 - protein, 2176 aa, synthetic construct
MPAAKRVKLDGGDKKYSIGLDIGTNSVGWAVITDEYKVPSKKFKVLGNTDRHSIKKNLIGALLFDSGETAEATRLKRTARRRYTRRKNRICYLQEIFSNEMAKVDDSFFHRLEESFLVEEDKKHERHPIFGNIVDEVAYHEKYPTIYHLRKKLVDSTDKADLRLIYLALAHMIKFRGHFLIEGDLNPDNSDVDKLFIQLVQTYNQLFEENPINASGVDAKAILSARLSKSRRLENLIAQLPGEKKNGLFGNLIALSLGLTPNFKSNFDLAEDAKLQLSKDTYDDDLDNLLAQIGDQYADLFLAAKNLSDAILLSDILRVNTEITKAPLSASMIKRYDEHHQDLTLLKALVRQQLPEKYKEIFFDQSKNGYAGYIDGGASQEEFYKFIKPILEKMDGTEELLVKLNREDLLRKQRTFDNGSIPHQIHLGELHAILRRQEDFYPFLKDNREKIEKILTFRIPYYVGPLARGNSRFAWMTRKSEETITPWNFEEVVDKGASAQSFIERMTNFDKNLPNEKVLPKHSLLYEYFTVYNELTKVKYVTEGMRKPAFLSGEQKKAIVDLLFKTNRKVTVKQLKEDYFKKIECFDSVEISGVEDRFNASLGTYHDLLKIIKDKDFLDNEENEDILEDIVLTLTLFEDREMIEERLKTYAHLFDDKVMKQLKRRRYTGWGRLSRKLINGIRDKQSGKTILDFLKSDGFANRNFMQLIHDDSLTFKEDIQKAQVSGQGDSLHEHIANLAGSPAIKKGILQTVKVVDELVKVMGRHKPENIVIEMARENQTTQKGQKNSRERMKRIEEGIKELGSQILKEHPVENTQLQNEKLYLYYLQNGRDMYVDQELDINRLSDYDVDHIVPQSFLKDDSIDNKVLTRSDKARGKSDNVPSEEVVKKMKNYWRQLLNAKLITQRKFDNLTKAERGGLSELDKAGFIKRQLVETRQITKHVAQILDSRMNTKYDENDKLIREVKVITLKSKLVSDFRKDFQFYKVREINNYHHAHDAYLNAVVGTALIKKYPKLESEFVYGDYKVYDVRKMIAKSEQEIGKATAKYFFYSNIMNFFKTEITLANGEIRKRPLIETNGETGEIVWDKGRDFATVRKVLSMPQVNIVKKTEVQTGGFSKESILPKRNSDKLIARKKDWDPKKYGGFDSPTVAYSVLVVAKVEKGKSKKLKSVKELLGITIMERSSFEKNPIDFLEAKGYKEVKKDLIIKLPKYSLFELENGRKRMLASAGELQKGNELALPSKYVNFLYLASHYEKLKGSPEDNEQKQLFVEQHKHYLDEIIEQISEFSKRVILADANLDKVLSAYNKHRDKPIREQAENIIHLFTLTNLGAPAAFKYFDTTIDRKRYTSTKEVLDATLIHQSITGLYETRIDLSQLGGDGGGSSGGSEAAAKGGMDPLQLLQPLEAEIKGTKLKAHWNSGATITCVPQAFLEEEVPIKNIWIKTIHGEKEQPVYYLTFKIQGRKVEAEVISSPYDYILVSPSDIPWLMKKPLQLTTLVPLQEYEERLLKQTMLTGSYKEKLQSLFLKYDALWQHWENQVGHRRIKPHHIATGTVNPRPQKQYPINPKAKASIQTVINDLLKQGVLIQQNSIMNTPVYPVPKPDGKWRMVLDYREVNKTIPLIAAQNQHSAGILSSIFRGKYKTTLDLSNGFWAHSITPESYWLTAFTWLGQQYCWTRLPQGFLNSPALFNADVVDLLKEVPNVQVYVDDIYISHDDPREHLEQLEKVFSLLLNAGYVVSLKKSEIAQHEVEFLGFNITKEGRGLTETFKQKLLNITPPRDLKQLQSILGLLNFARNFIPNFSELVKPLYNIIATAPGKYITWTTDNSQQLQNIISMLNSAENLEERNPEVRLIMKVNTSPSAGYIRFYNEFAKRPIMYLNYVYTKAEVKFTNTEKLLTTIHKGLIKALDLGMGQEILVYSPIVSMTKIQKTPLPERKALPIRWITWMSYLEDPRIQFHYDKTLPELQQVPTVTDDIIAKIKHPSEFSMVFYTDGSAIKHPNVNKSHNAGMGIAQVQFKPEFTVINTWSIPLGDHTAQLAEVAAVEFACKKALKIDGPVLIVTDSFYVAESVNKELPYWQSNGFFNNKKKPLKHVSKWKSIADCIQLKPDIIIIHEKGHQPTASTFHTEGNNLADKLATQGSYVVNAGKRTADGSEFEKRTADGSEFESPKKKAKVE

SEQ ID NO: 7078 - protein, 2098 aa, synthetic construct
MPAAKRVKLDGGDKKYSIGLDIGTNSVGWAVITDEYKVPSKKFKVLGNTDRHSIKKNLIGALLFDSGETAEATRLKRTARRRYTRRKNRICYLQEIFSNEMAKVDDSFFHRLEESFLVEEDKKHERHPIFGNIVDEVAYHEKYPTIYHLRKKLVDSTDKADLRLIYLALAHMIKFRGHFLIEGDLNPDNSDVDKLFIQLVQTYNQLFEENPINASGVDAKAILSARLSKSRRLENLIAQLPGEKKNGLFGNLIALSLGLTPNFKSNFDLAEDAKLQLSKDTYDDDLDNLLAQIGDQYADLFLAAKNLSDAILLSDILRVNTEITKAPLSASMIKRYDEHHQDLTLLKALVRQQLPEKYKEIFFDQSKNGYAGYIDGGASQEEFYKFIKPILEKMDGTEELLVKLNREDLLRKQRTFDNGSIPHQIHLGELHAILRRQEDFYPFLKDNREKIEKILTFRIPYYVGPLARGNSRFAWMTRKSEETITPWNFEEVVDKGASAQSFIERMTNFDKNLPNEKVLPKHSLLYEYFTVYNELTKVKYVTEGMRKPAFLSGEQKKAIVDLLFKTNRKVTVKQLKEDYFKKIECFDSVEISGVEDRFNASLGTYHDLLKIIKDKDFLDNEENEDILEDIVLTLTLFEDREMIEERLKTYAHLFDDKVMKQLKRRRYTGWGRLSRKLINGIRDKQSGKTILDFLKSDGFANRNFMQLIHDDSLTFKEDIQKAQVSGQGDSLHEHIANLAGSPAIKKGILQTVKVVDELVKVMGRHKPENIVIEMARENQTTQKGQKNSRERMKRIEEGIKELGSQILKEHPVENTQLQNEKLYLYYLQNGRDMYVDQELDINRLSDYDVDHIVPQSFLKDDSIDNKVLTRSDKARGKSDNVPSEEVVKKMKNYWRQLLNAKLITQRKFDNLTKAERGGLSELDKAGFIKRQLVETRQITKHVAQILDSRMNTKYDENDKLIREVKVITLKSKLVSDFRKDFQFYKVREINNYHHAHDAYLNAVVGTALIKKYPKLESEFVYGDYKVYDVRKMIAKSEQEIGKATAKYFFYSNIMNFFKTEITLANGEIRKRPLIETNGETGEIVWDKGRDFATVRKVLSMPQVNIVKKTEVQTGGFSKESILPKRNSDKLIARKKDWDPKKYGGFDSPTVAYSVLVVAKVEKGKSKKLKSVKELLGITIMERSSFEKNPIDFLEAKGYKEVKKDLIIKLPKYSLFELENGRKRMLASAGELQKGNELALPSKYVNFLYLASHYEKLKGSPEDNEQKQLFVEQHKHYLDEIIEQISEFSKRVILADANLDKVLSAYNKHRDKPIREQAENIIHLFTLTNLGAPAAFKYFDTTIDRKRYTSTKEVLDATLIHQSITGLYETRIDLSQLGGDGGGSSEAAAKGGSGGTAPLEEEYRLFLEAPIQNVTLLEQWKREIPKVWAEINPPGLASTQAPIHVQLLSTALPVRVRQYPITLEAKRSLRETIRKFRAAGILRPVHSPWNTPLLPVRKSGTSEYRMVQDLREVNKRVETIHPTVPNPYTLLSLLPPDRIWYSVLDLKDAFFCIPLAPESQLIFAFEWADAEEGESGQLTWTRLPQGFKNSPTLFDEALNRDLQGFRLDHPSVSLLQYVDDLLIAADTQAACLSATRDLLMTLAELGYRVSGKKAQLCQEEVTYLGFKIHKGSRSLSNSRTQAILQIPVPKTKRQVREFLGTIGYCRLWIPGFAELAQPLYAATRGGNDPLVWGEKEEEAFQSLKLALTQPPALALPSLDKPFQLFVEETSGAAKGVLTQALGPWKRPVAYLSKRLDPVAAGWPRCLRAIAAAALLTREASKLTFGQDIEITSSHNLESLLRSPPDKWLTNARITQYQVLLLDPPRVRFKQTAALNPATLLPETDDTLPIHHCLDTLDSLTSTRPDLTDQPLAQAEATLFTDGSSYIRDGKRYAGAAVVTLDSVIWAEPLPIGTSAQKAELIALTKALEWSKDKSVNIYTDSRYAFATLHVHGMIYRERGLLTAGGKAIKNAPEILALLTAVWLPKRVAVMHCKGHQKDDAPTSTGNRRADEVAREVAIRPLSTQATISAGKRTADGSEFEKRTADGSEFESPKKKAKVE

SEQ ID NO: 7079 - protein, 2098 aa, synthetic construct
MPAAKRVKLDGGDKKYSIGLDIGTNSVGWAVITDEYKVPSKKFKVLGNTDRHSIKKNLIGALLFDSGETAEATRLKRTARRRYTRRKNRICYLQEIFSNEMAKVDDSFFHRLEESFLVEEDKKHERHPIFGNIVDEVAYHEKYPTIYHLRKKLVDSTDKADLRLIYLALAHMIKFRGHFLIEGDLNPDNSDVDKLFIQLVQTYNQLFEENPINASGVDAKAILSARLSKSRRLENLIAQLPGEKKNGLFGNLIALSLGLTPNFKSNFDLAEDAKLQLSKDTYDDDLDNLLAQIGDQYADLFLAAKNLSDAILLSDILRVNTEITKAPLSASMIKRYDEHHQDLTLLKALVRQQLPEKYKEIFFDQSKNGYAGYIDGGASQEEFYKFIKPILEKMDGTEELLVKLNREDLLRKQRTFDNGSIPHQIHLGELHAILRRQEDFYPFLKDNREKIEKILTFRIPYYVGPLARGNSRFAWMTRKSEETITPWNFEEVVDKGASAQSFIERMTNFDKNLPNEKVLPKHSLLYEYFTVYNELTKVKYVTEGMRKPAFLSGEQKKAIVDLLFKTNRKVTVKQLKEDYFKKIECFDSVEISGVEDRFNASLGTYHDLLKIIKDKDFLDNEENEDILEDIVLTLTLFEDREMIEERLKTYAHLFDDKVMKQLKRRRYTGWGRLSRKLINGIRDKQSGKTILDFLKSDGFANRNFMQLIHDDSLTFKEDIQKAQVSGQGDSLHEHIANLAGSPAIKKGILQTVKVVDELVKVMGRHKPENIVIEMARENQTTQKGQKNSRERMKRIEEGIKELGSQILKEHPVENTQLQNEKLYLYYLQNGRDMYVDQELDINRLSDYDVDHIVPQSFLKDDSIDNKVLTRSDKARGKSDNVPSEEVVKKMKNYWRQLLNAKLITQRKFDNLTKAERGGLSELDKAGFIKRQLVETRQITKHVAQILDSRMNTKYDENDKLIREVKVITLKSKLVSDFRKDFQFYKVREINNYHHAHDAYLNAVVGTALIKKYPKLESEFVYGDYKVYDVRKMIAKSEQEIGKATAKYFFYSNIMNFFKTEITLANGEIRKRPLIETNGETGEIVWDKGRDFATVRKVLSMPQVNIVKKTEVQTGGFSKESILPKRNSDKLIARKKDWDPKKYGGFDSPTVAYSVLVVAKVEKGKSKKLKSVKELLGITIMERSSFEKNPIDFLEAKGYKEVKKDLIIKLPKYSLFELENGRKRMLASAGELQKGNELALPSKYVNFLYLASHYEKLKGSPEDNEQKQLFVEQHKHYLDEIIEQISEFSKRVILADANLDKVLSAYNKHRDKPIREQAENIIHLFTLTNLGAPAAFKYFDTTIDRKRYTSTKEVLDATLIHQSITGLYETRIDLSQLGGDGGGSSEAAAKGGSGGTAPLEEEYRLFLEAPIQNVTLLEQWKREIPKVWAEINPPGLASTQAPIHVQLLSTALPVRVRQYPITLEAKRSLRETIRKFRAAGILRPVHSPWNTPLLPVRKSGTSEYRMVQDLREVNKRVETIHPTVPNPYTLLSLLPPDRIWYSVLDLKDAFFCIPLAPESQLIFAFEWADAEEGESGQLTWTRLPQGFKNSPTLFNEALNRDLQGFRLDHPSVSLLQYVDDLLIAADTQAACLSATRDLLMTLAELGYRVSGKKAQLCQEEVTYLGFKIHKGSRSLSNSRTQAILQIPVPKTKRQVREFLGTIGYCRLWIPGFAELAQPLYAATRPGNDPLVWGEKEEEAFQSLKLALTQPPALALPSLDKPFQLFVEETSGAAKGVLTQALGPWKRPVAYLSKRLDPVAAGWPRCLRAIAAAALLTREASKLTFGQDIEITSSHNLESLLRSPPDKWLTNARITQYQVLLLDPPRVRFKQTAALNPATLLPETDDTLPIHHCLDTLDSLTSTRPDLTDQPLAQAEATLFTDGSSYIRDGKRYAGAAVVTLDSVIWAEPLPIGTSAQKAELIALTKALEWSKDKSVNIYTDSRYAFATLHVHGMIYRERGWLTAGGKAIKNAPEILALLTAVWLPKRVAVMHCKGHQKDDAPTSTGNRRADEVAREVAIRPLSTQATISAGKRTADGSEFEKRTADGSEFESPKKKAKVE

SEQ ID NO: 7080 - protein, 2098 aa, synthetic construct
MPAAKRVKLDGGDKKYSIGLDIGTNSVGWAVITDEYKVPSKKFKVLGNTDRHSIKKNLIGALLFDSGETAEATRLKRTARRRYTRRKNRICYLQEIFSNEMAKVDDSFFHRLEESFLVEEDKKHERHPIFGNIVDEVAYHEKYPTIYHLRKKLVDSTDKADLRLIYLALAHMIKFRGHFLIEGDLNPDNSDVDKLFIQLVQTYNQLFEENPINASGVDAKAILSARLSKSRRLENLIAQLPGEKKNGLFGNLIALSLGLTPNFKSNFDLAEDAKLQLSKDTYDDDLDNLLAQIGDQYADLFLAAKNLSDAILLSDILRVNTEITKAPLSASMIKRYDEHHQDLTLLKALVRQQLPEKYKEIFFDQSKNGYAGYIDGGASQEEFYKFIKPILEKMDGTEELLVKLNREDLLRKQRTFDNGSIPHQIHLGELHAILRRQEDFYPFLKDNREKIEKILTFRIPYYVGPLARGNSRFAWMTRKSEETITPWNFEEVVDKGASAQSFIERMTNFDKNLPNEKVLPKHSLLYEYFTVYNELTKVKYVTEGMRKPAFLSGEQKKAIVDLLFKTNRKVTVKQLKEDYFKKIECFDSVEISGVEDRFNASLGTYHDLLKIIKDKDFLDNEENEDILEDIVLTLTLFEDREMIEERLKTYAHLFDDKVMKQLKRRRYTGWGRLSRKLINGIRDKQSGKTILDFLKSDGFANRNFMQLIHDDSLTFKEDIQKAQVSGQGDSLHEHIANLAGSPAIKKGILQTVKVVDELVKVMGRHKPENIVIEMARENQTTQKGQKNSRERMKRIEEGIKELGSQILKEHPVENTQLQNEKLYLYYLQNGRDMYVDQELDINRLSDYDVDHIVPQSFLKDDSIDNKVLTRSDKARGKSDNVPSEEVVKKMKNYWRQLLNAKLITQRKFDNLTKAERGGLSELDKAGFIKRQLVETRQITKHVAQILDSRMNTKYDENDKLIREVKVITLKSKLVSDFRKDFQFYKVREINNYHHAHDAYLNAVVGTALIKKYPKLESEFVYGDYKVYDVRKMIAKSEQEIGKATAKYFFYSNIMNFFKTEITLANGEIRKRPLIETNGETGEIVWDKGRDFATVRKVLSMPQVNIVKKTEVQTGGFSKESILPKRNSDKLIARKKDWDPKKYGGFDSPTVAYSVLVVAKVEKGKSKKLKSVKELLGITIMERSSFEKNPIDFLEAKGYKEVKKDLIIKLPKYSLFELENGRKRMLASAGELQKGNELALPSKYVNFLYLASHYEKLKGSPEDNEQKQLFVEQHKHYLDEIIEQISEFSKRVILADANLDKVLSAYNKHRDKPIREQAENIIHLFTLTNLGAPAAFKYFDTTIDRKRYTSTKEVLDATLIHQSITGLYETRIDLSQLGGDGGGSSEAAAKGGSGGTAPLEEEYRLFLEAPIQNVTLLEQWKREIPKVWAEINPPGLASTQAPIHVQLLSTALPVRVRQYPITLEAKRSLRETIRKFRAAGILRPVHSPWNTPLLPVRKSGTSEYRMVQDLREVNKRVETIHPTVPNPYTLLSLLPPDRIWYSVLDLKDAFFCIPLAPESQLIFAFEWADAEEGESGQLTWTRLPQGFKNSPTLFNEALNRDLQGFRLDHPSVSLLQYVDDLLIAADTQAACLSATRDLLMTLAELGYRVSGKKAQLCQEEVTYLGFKIHKGSRSLSNSRTQAILQIPVPKTKRQVREFLGKIGYCRLFIPGFAELAQPLYAATRPGNDPLVWGEKEEEAFQSLKLALTQPPALALPSLDKPFQLFVEETSGAAKGVLTQALGPWKRPVAYLSKRLDPVAAGWPRCLRAIAAAALLTREASKLTFGQDIEITSSHNLESLLRSPPDKWLTNARITQYQVLLLDPPRVRFKQTAALNPATLLPETDDTLPIHHCLDTLDSLTSTRPDLTDQPLAQAEATLFTDGSSYIRDGKRYAGAAVVTLDSVIWAEPLPIGTSAQKAELIALTKALEWSKDKSVNIYTDSRYAFATLHVHGMIYRERGWLTAGGKAIKNAPEILALLTAVWLPKRVAVMHCKGHQKDDAPTSTGNRRADEVAREVAIRPLSTQATISAGKRTADGSEFEKRTADGSEFESPKKKAKVE

SEQ ID NO: 7081 - protein, 2102 aa, synthetic construct
MPAAKRVKLDGGDKKYSIGLDIGTNSVGWAVITDEYKVPSKKFKVLGNTDRHSIKKNLIGALLFDSGETAEATRLKRTARRRYTRRKNRICYLQEIFSNEMAKVDDSFFHRLEESFLVEEDKKHERHPIFGNIVDEVAYHEKYPTIYHLRKKLVDSTDKADLRLIYLALAHMIKFRGHFLIEGDLNPDNSDVDKLFIQLVQTYNQLFEENPINASGVDAKAILSARLSKSRRLENLIAQLPGEKKNGLFGNLIALSLGLTPNFKSNFDLAEDAKLQLSKDTYDDDLDNLLAQIGDQYADLFLAAKNLSDAILLSDILRVNTEITKAPLSASMIKRYDEHHQDLTLLKALVRQQLPEKYKEIFFDQSKNGYAGYIDGGASQEEFYKFIKPILEKMDGTEELLVKLNREDLLRKQRTFDNGSIPHQIHLGELHAILRRQEDFYPFLKDNREKIEKILTFRIPYYVGPLARGNSRFAWMTRKSEETITPWNFEEVVDKGASAQSFIERMTNFDKNLPNEKVLPKHSLLYEYFTVYNELTKVKYVTEGMRKPAFLSGEQKKAIVDLLFKTNRKVTVKQLKEDYFKKIECFDSVEISGVEDRFNASLGTYHDLLKIIKDKDFLDNEENEDILEDIVLTLTLFEDREMIEERLKTYAHLFDDKVMKQLKRRRYTGWGRLSRKLINGIRDKQSGKTILDFLKSDGFANRNFMQLIHDDSLTFKEDIQKAQVSGQGDSLHEHIANLAGSPAIKKGILQTVKVVDELVKVMGRHKPENIVIEMARENQTTQKGQKNSRERMKRIEEGIKELGSQILKEHPVENTQLQNEKLYLYYLQNGRDMYVDQELDINRLSDYDVDHIVPQSFLKDDSIDNKVLTRSDKARGKSDNVPSEEVVKKMKNYWRQLLNAKLITQRKFDNLTKAERGGLSELDKAGFIKRQLVETRQITKHVAQILDSRMNTKYDENDKLIREVKVITLKSKLVSDFRKDFQFYKVREINNYHHAHDAYLNAVVGTALIKKYPKLESEFVYGDYKVYDVRKMIAKSEQEIGKATAKYFFYSNIMNFFKTEITLANGEIRKRPLIETNGETGEIVWDKGRDFATVRKVLSMPQVNIVKKTEVQTGGFSKESILPKRNSDKLIARKKDWDPKKYGGFDSPTVAYSVLVVAKVEKGKSKKLKSVKELLGITIMERSSFEKNPIDFLEAKGYKEVKKDLIIKLPKYSLFELENGRKRMLASAGELQKGNELALPSKYVNFLYLASHYEKLKGSPEDNEQKQLFVEQHKHYLDEIIEQISEFSKRVILADANLDKVLSAYNKHRDKPIREQAENIIHLFTLTNLGAPAAFKYFDTTIDRKRYTSTKEVLDATLIHQSITGLYETRIDLSQLGGDGGGSSEAAAKGGSGGTVSLQDEHRLFDIPVTTSLPDVWLQDFPQAWAETGGLGRAKCQAPIIIDLKPTAVPVSIKQYPMSLEAHMGIRQHIIKFLELGVLRPCRSPWNTPLLPVKKPGTQDYRPVQDLREINKRTVDIHPTVPNPYNLLSTLKPDYSWYTVLDLKDAFFCLPLAPQSQELFAFEWKDPERGISGQLTWTRLPQGFKNSPTLFNEALHRDLTDFRTQHPEVTLLQYVDDLLLAAPTKKACTQGTRHLLQELGEKGYRASAKKAQICQTKVTYLGYILSEGKRWLTPGRIETVARIPPPRNPREVREFLGTAGFCRLWIPGFAELAAPLYALTKPSTPFTWQTEHQLAFEALKKALLSAPALGLPDTSKPFTLFLDERQGIAKGVLTQKLGPWKRPVAYLSKKLDPVAAGWPPCLRIMAATAMLVKDSAKLTLGQPLTVITPHTLEAIVRQPPDRWITNARLTHYQALLLDTDRVQFGPPVTLNPATLLPVPENQPSPHDCRQVLAETHGTREDLKDQELPDADHTWYTDGSSYLDSGTRRAGAAVVDGHNTIWAQSLPPGTSAQKAELIALTKALELSKGKKANIYTDSRYAFATAHTHGSIYERRGWLTSEGKEIKNKAEIIALLKALFLPQEVAIIHCPGHQKGQDPVAVGNRQADRVARQAAMAEVLTLATEPDNTSHITAGKRTADGSEFEKRTADGSEFESPKKKAKVE

SEQ ID NO: 7082 - protein, 2095 aa, synthetic construct
MPAAKRVKLDGGDKKYSIGLDIGTNSVGWAVITDEYKVPSKKFKVLGNTDRHSIKKNLIGALLFDSGETAEATRLKRTARRRYTRRKNRICYLQEIFSNEMAKVDDSFFHRLEESFLVEEDKKHERHPIFGNIVDEVAYHEKYPTIYHLRKKLVDSTDKADLRLIYLALAHMIKFRGHFLIEGDLNPDNSDVDKLFIQLVQTYNQLFEENPINASGVDAKAILSARLSKSRRLENLIAQLPGEKKNGLFGNLIALSLGLTPNFKSNFDLAEDAKLQLSKDTYDDDLDNLLAQIGDQYADLFLAAKNLSDAILLSDILRVNTEITKAPLSASMIKRYDEHHQDLTLLKALVRQQLPEKYKEIFFDQSKNGYAGYIDGGASQEEFYKFIKPILEKMDGTEELLVKLNREDLLRKQRTFDNGSIPHQIHLGELHAILRRQEDFYPFLKDNREKIEKILTFRIPYYVGPLARGNSRFAWMTRKSEETITPWNFEEVVDKGASAQSFIERMTNFDKNLPNEKVLPKHSLLYEYFTVYNELTKVKYVTEGMRKPAFLSGEQKKAIVDLLFKTNRKVTVKQLKEDYFKKIECFDSVEISGVEDRFNASLGTYHDLLKIIKDKDFLDNEENEDILEDIVLTLTLFEDREMIEERLKTYAHLFDDKVMKQLKRRRYTGWGRLSRKLINGIRDKQSGKTILDFLKSDGFANRNFMQLIHDDSLTFKEDIQKAQVSGQGDSLHEHIANLAGSPAIKKGILQTVKVVDELVKVMGRHKPENIVIEMARENQTTQKGQKNSRERMKRIEEGIKELGSQILKEHPVENTQLQNEKLYLYYLQNGRDMYVDQELDINRLSDYDVDHIVPQSFLKDDSIDNKVLTRSDKARGKSDNVPSEEVVKKMKNYWRQLLNAKLITQRKFDNLTKAERGGLSELDKAGFIKRQLVETRQITKHVAQILDSRMNTKYDENDKLIREVKVITLKSKLVSDFRKDFQFYKVREINNYHHAHDAYLNAVVGTALIKKYPKLESEFVYGDYKVYDVRKMIAKSEQEIGKATAKYFFYSNIMNFFKTEITLANGEIRKRPLIETNGETGEIVWDKGRDFATVRKVLSMPQVNIVKKTEVQTGGFSKESILPKRNSDKLIARKKDWDPKKYGGFDSPTVAYSVLVVAKVEKGKSKKLKSVKELLGITIMERSSFEKNPIDFLEAKGYKEVKKDLIIKLPKYSLFELENGRKRMLASAGELQKGNELALPSKYVNFLYLASHYEKLKGSPEDNEQKQLFVEQHKHYLDEIIEQISEFSKRVILADANLDKVLSAYNKHRDKPIREQAENIIHLFTLTNLGAPAAFKYFDTTIDRKRYTSTKEVLDATLIHQSITGLYETRIDLSQLGGDGGGSSEAAAKGGSGGTLQLEEEYRLFEPESTQKQEMDIWLKNFPQAWAETGGMGTAHCQAPVLIQLKATATPISIRQYPMPHEAYQGIKPHIRRMLDQGILKPCQSPWNTPLLPVKKPGTEDYRPVQDLREVNKRVEDIHPTVPNPYNLLSTLPPSHPWYTVLDLKDAFFCLRLHSESQLLFAFEWRDPEIGLSGQLTWTRLPQGFKNSPTLFNEALHSDLADFRVRYPALVLLQYVDDLLLAAATRTECLEGTKALLETLGNKGYRASAKKAQICLQEVTYLGYSLKDGQRWLTKARKEAILSIPVPKNSRQVREFLGTAGYCRLWIPGFAELAAPLYPLTRPGTLFQWGTEQQLAFEDIKKALLSSPALGLPDITKPFELFIDENSGFAKGVLVQKLGPWKRPVAYLSKKLDTVASGWPPCLRMVAAIAILVKDAGKLTLGQPLTILTSHPVEALVRQPPNKWLSNARMTHYQAMLLDAERVHFGPTVSLNPATLLPLPSGGNHHDCLQILAETHGTRPDLTDQPLPDADLTWYTDGSSFIRNGEREAGAAVTTESEVIWAAPLPPGTSAQRAELIALTQALKMAEGKKLTVYTDSRYAFATTHVHGEIYRRRGWLTSEGKEIKNKNEILALLEALFLPKRLSIIHCPGHQKGDSPQAKGNRLADDTAKKAATETHSSLTVLPAGKRTADGSEFEKRTADGSEFESPKKKAKVE

SEQ ID NO: 7083 - protein, 2176 aa, synthetic construct
MPAAKRVKLDGGDKKYSIGLDIGTNSVGWAVITDEYKVPSKKFKVLGNTDRHSIKKNLIGALLFDSGETAEATRLKRTARRRYTRRKNRICYLQEIFSNEMAKVDDSFFHRLEESFLVEEDKKHERHPIFGNIVDEVAYHEKYPTIYHLRKKLVDSTDKADLRLIYLALAHMIKFRGHFLIEGDLNPDNSDVDKLFIQLVQTYNQLFEENPINASGVDAKAILSARLSKSRRLENLIAQLPGEKKNGLFGNLIALSLGLTPNFKSNFDLAEDAKLQLSKDTYDDDLDNLLAQIGDQYADLFLAAKNLSDAILLSDILRVNTEITKAPLSASMIKRYDEHHQDLTLLKALVRQQLPEKYKEIFFDQSKNGYAGYIDGGASQEEFYKFIKPILEKMDGTEELLVKLNREDLLRKQRTFDNGSIPHQIHLGELHAILRRQEDFYPFLKDNREKIEKILTFRIPYYVGPLARGNSRFAWMTRKSEETITPWNFEEVVDKGASAQSFIERMTNFDKNLPNEKVLPKHSLLYEYFTVYNELTKVKYVTEGMRKPAFLSGEQKKAIVDLLFKTNRKVTVKQLKEDYFKKIECFDSVEISGVEDRFNASLGTYHDLLKIIKDKDFLDNEENEDILEDIVLTLTLFEDREMIEERLKTYAHLFDDKVMKQLKRRRYTGWGRLSRKLINGIRDKQSGKTILDFLKSDGFANRNFMQLIHDDSLTFKEDIQKAQVSGQGDSLHEHIANLAGSPAIKKGILQTVKVVDELVKVMGRHKPENIVIEMARENQTTQKGQKNSRERMKRIEEGIKELGSQILKEHPVENTQLQNEKLYLYYLQNGRDMYVDQELDINRLSDYDVDHIVPQSFLKDDSIDNKVLTRSDKARGKSDNVPSEEVVKKMKNYWRQLLNAKLITQRKFDNLTKAERGGLSELDKAGFIKRQLVETRQITKHVAQILDSRMNTKYDENDKLIREVKVITLKSKLVSDFRKDFQFYKVREINNYHHAHDAYLNAVVGTALIKKYPKLESEFVYGDYKVYDVRKMIAKSEQEIGKATAKYFFYSNIMNFFKTEITLANGEIRKRPLIETNGETGEIVWDKGRDFATVRKVLSMPQVNIVKKTEVQTGGFSKESILPKRNSDKLIARKKDWDPKKYGGFDSPTVAYSVLVVAKVEKGKSKKLKSVKELLGITIMERSSFEKNPIDFLEAKGYKEVKKDLIIKLPKYSLFELENGRKRMLASAGELQKGNELALPSKYVNFLYLASHYEKLKGSPEDNEQKQLFVEQHKHYLDEIIEQISEFSKRVILADANLDKVLSAYNKHRDKPIREQAENIIHLFTLTNLGAPAAFKYFDTTIDRKRYTSTKEVLDATLIHQSITGLYETRIDLSQLGGDGGGSSEAAAKGGSGGMNPLQLLQPLPAEIKGTKLLAHWNSGATITCIPESFLEDEQPIKKTLIKTIHGEKQQNVYYVTFKVKGRKVEAEVIASPYEYILLSPTDVPWLTQQPLQLTILVPLQEYQEKILSKTALPEDQKQQLKTLFVKYDNLWQHWENQVGHRKIRPHNIATGDYPPRPQKQYPINPKAKPSIQIVIDDLLKQGVLTPQNSTMNTPVYPVPKPDGRWRMVLDYREVNKTIPLTAAQNQHSAGILATIVRQKYKTTLDLANGFWAHPITPESYWLTAFTWQGKQYCWTRLPQGFLNSPALFTADVVDLLKEIPNVQVYVDDIYLSHDDPKEHVQQLEKVFQILLQAGYVVSLKKSEIGQKTVEFLGFNITKEGRGLTDTFKTKLLNITPPKDLKQLQSILGLLNFARNFIPNFAELVQPLYNLIASAKGKYIEWSEENTKQLNMVIEALNTASNLEERLPEQRLVIKVNTSPSAGYVRYYNETGKKPIMYLNYVFSKAELKFSMLEKLLTTMHKALIKAMDLAMGQEILVYSPIVSMTKIQKTPLPERKALPIRWITWMTYLEDPRIQFHYDKTLPELKHIPDVYTSSQSPVKHPSQYEGVFYTDGSAIKSPDPTKSNNAGMGIVHATYKPEYQVLNQWSIPLGNHTAQMAEIAAVEFACKKALKIPGPVLVITDSFYVAESANKELPYWKSNGFVNNKKKPLKHISKWKSIAECLSMKPDITIQHEKGISLQIPVFILKGNALADKLATQGSYVVNAGKRTADGSEFEKRTADGSEFESPKKKAKVE

SEQ ID NO: 7084 - protein, 2218 aa, synthetic construct
MPAAKRVKLDGGDKKYSIGLDIGTNSVGWAVITDEYKVPSKKFKVLGNTDRHSIKKNLIGALLFDSGETAEATRLKRTARRRYTRRKNRICYLQEIFSNEMAKVDDSFFHRLEESFLVEEDKKHERHPIFGNIVDEVAYHEKYPTIYHLRKKLVDSTDKADLRLIYLALAHMIKFRGHFLIEGDLNPDNSDVDKLFIQLVQTYNQLFEENPINASGVDAKAILSARLSKSRRLENLIAQLPGEKKNGLFGNLIALSLGLTPNFKSNFDLAEDAKLQLSKDTYDDDLDNLLAQIGDQYADLFLAAKNLSDAILLSDILRVNTEITKAPLSASMIKRYDEHHQDLTLLKALVRQQLPEKYKEIFFDQSKNGYAGYIDGGASQEEFYKFIKPILEKMDGTEELLVKLNREDLLRKQRTFDNGSIPHQIHLGELHAILRRQEDFYPFLKDNREKIEKILTFRIPYYVGPLARGNSRFAWMTRKSEETITPWNFEEVVDKGASAQSFIERMTNFDKNLPNEKVLPKHSLLYEYFTVYNELTKVKYVTEGMRKPAFLSGEQKKAIVDLLFKTNRKVTVKQLKEDYFKKIECFDSVEISGVEDRFNASLGTYHDLLKIIKDKDFLDNEENEDILEDIVLTLTLFEDREMIEERLKTYAHLFDDKVMKQLKRRRYTGWGRLSRKLINGIRDKQSGKTILDFLKSDGFANRNFMQLIHDDSLTFKEDIQKAQVSGQGDSLHEHIANLAGSPAIKKGILQTVKVVDELVKVMGRHKPENIVIEMARENQTTQKGQKNSRERMKRIEEGIKELGSQILKEHPVENTQLQNEKLYLYYLQNGRDMYVDQELDINRLSDYDVDHIVPQSFLKDDSIDNKVLTRSDKARGKSDNVPSEEVVKKMKNYWRQLLNAKLITQRKFDNLTKAERGGLSELDKAGFIKRQLVETRQITKHVAQILDSRMNTKYDENDKLIREVKVITLKSKLVSDFRKDFQFYKVREINNYHHAHDAYLNAVVGTALIKKYPKLESEFVYGDYKVYDVRKMIAKSEQEIGKATAKYFFYSNIMNFFKTEITLANGEIRKRPLIETNGETGEIVWDKGRDFATVRKVLSMPQVNIVKKTEVQTGGFSKESILPKRNSDKLIARKKDWDPKKYGGFDSPTVAYSVLVVAKVEKGKSKKLKSVKELLGITIMERSSFEKNPIDFLEAKGYKEVKKDLIIKLPKYSLFELENGRKRMLASAGELQKGNELALPSKYVNFLYLASHYEKLKGSPEDNEQKQLFVEQHKHYLDEIIEQISEFSKRVILADANLDKVLSAYNKHRDKPIREQAENIIHLFTLTNLGAPAAFKYFDTTIDRKRYTSTKEVLDATLIHQSITGLYETRIDLSQLGGDGGGSSEAAAKGGSGGTLGDQGSRGSDPLPEPRVTLTVEGIPTEFLVNTGAEHSVLTKPMGKMGSKRTVVAGATGSKVYPWTTKRLLKIGQKQVTHSFLVIPECPAPLLGRDLLTKLKAQIQFSTEGPQVTWEDRPAMCLVLNLEEEYRLHEKPVPPSIDPSWLQLFPMVWAEKAGMGLANQVPPVVVELKSDASPVAVRQYPMSKEAREGIRPHIQRFLDLGILVPCQSPWNTPLLPVKKPGTNDYRPVQDLREVNKRVQDIHPTVPNPYNLLSSLPPSHTWYSVLDLKDAFFCLKLHPNSQPLFAFEWRDPEKGNTGQLTWTRLPQGFKNSPTLFNEALHRDLASFRALNPQVVMLQYVDDLLVAAPTYRDCKEGTRRLLQELSKLGYRVSAKKAQLCREEVTYLGYLLKGGKRWLTPARKATVMKIPTPTTPRQVREFLGTAGFCRLWIPGFASLAAPLYPLTRPKVPFTWTEAHQEAFGRIKEALLSAPALALPDLTKPFALYVDEKEGVARGVLTQTLGPWRRPVAYLSKKLDPVASGWPTCLKAIAAVALLLKDADKLTLGQNVLVIAPHNLESIVRQPPDRWMTNARMTHYQSLLLNERVSFAPPAILNPATLLPVESDDTPIHICSEILAEETGTRPDLRDQPLPGVPAWYTDGSSFIMDGRRQAGAAIVDNKRTVWASNLPEGTSAQKAELIALTQALRLAEGKSINIYTDSRYAFATAHVHGAIYKQRGWLTSAGKDIKNKEEILALLEAIHLPKRVAIIHCPGHQRGTDPVATGNRKADEAAKQAAQSTRILTETTKNAGKRTADGSEFEKRTADGSEFESPKKKAKVE

SEQ ID NO: 7085 - protein, 2096 aa, synthetic construct
MPAAKRVKLDGGDKKYSIGLDIGTNSVGWAVITDEYKVPSKKFKVLGNTDRHSIKKNLIGALLFDSGETAEATRLKRTARRRYTRRKNRICYLQEIFSNEMAKVDDSFFHRLEESFLVEEDKKHERHPIFGNIVDEVAYHEKYPTIYHLRKKLVDSTDKADLRLIYLALAHMIKFRGHFLIEGDLNPDNSDVDKLFIQLVQTYNQLFEENPINASGVDAKAILSARLSKSRRLENLIAQLPGEKKNGLFGNLIALSLGLTPNFKSNFDLAEDAKLQLSKDTYDDDLDNLLAQIGDQYADLFLAAKNLSDAILLSDILRVNTEITKAPLSASMIKRYDEHHQDLTLLKALVRQQLPEKYKEIFFDQSKNGYAGYIDGGASQEEFYKFIKPILEKMDGTEELLVKLNREDLLRKQRTFDNGSIPHQIHLGELHAILRRQEDFYPFLKDNREKIEKILTFRIPYYVGPLARGNSRFAWMTRKSEETITPWNFEEVVDKGASAQSFIERMTNFDKNLPNEKVLPKHSLLYEYFTVYNELTKVKYVTEGMRKPAFLSGEQKKAIVDLLFKTNRKVTVKQLKEDYFKKIECFDSVEISGVEDRFNASLGTYHDLLKIIKDKDFLDNEENEDILEDIVLTLTLFEDREMIEERLKTYAHLFDDKVMKQLKRRRYTGWGRLSRKLINGIRDKQSGKTILDFLKSDGFANRNFMQLIHDDSLTFKEDIQKAQVSGQGDSLHEHIANLAGSPAIKKGILQTVKVVDELVKVMGRHKPENIVIEMARENQTTQKGQKNSRERMKRIEEGIKELGSQILKEHPVENTQLQNEKLYLYYLQNGRDMYVDQELDINRLSDYDVDHIVPQSFLKDDSIDNKVLTRSDKARGKSDNVPSEEVVKKMKNYWRQLLNAKLITQRKFDNLTKAERGGLSELDKAGFIKRQLVETRQITKHVAQILDSRMNTKYDENDKLIREVKVITLKSKLVSDFRKDFQFYKVREINNYHHAHDAYLNAVVGTALIKKYPKLESEFVYGDYKVYDVRKMIAKSEQEIGKATAKYFFYSNIMNFFKTEITLANGEIRKRPLIETNGETGEIVWDKGRDFATVRKVLSMPQVNIVKKTEVQTGGFSKESILPKRNSDKLIARKKDWDPKKYGGFDSPTVAYSVLVVAKVEKGKSKKLKSVKELLGITIMERSSFEKNPIDFLEAKGYKEVKKDLIIKLPKYSLFELENGRKRMLASAGELQKGNELALPSKYVNFLYLASHYEKLKGSPEDNEQKQLFVEQHKHYLDEIIEQISEFSKRVILADANLDKVLSAYNKHRDKPIREQAENIIHLFTLTNLGAPAAFKYFDTTIDRKRYTSTKEVLDATLIHQSITGLYETRIDLSQLGGDGGGSSEAAAKGGSGGTLNLEDEYRLYETSAEPEVSPGSTWLSDFPQAWAETGGMGLAVRQAPLIIPLKATSTPVSIKQYPMSQEAKLGIKPHIQRLLDQGILVPCQSPWNTPLLPVKKPGTNDYRPVQDLREVNKRVEDIHPTVPNPYNLLSGLPPSHRWYTVLDLKDAFFCLRLHPTSQPLFAFEWRDPGMGISGQLTWTRLPQGFKNSPTLFNEALHRDLADFRIQHPDLILLQYVDDILLAATSELDCQQGTRALLLTLGNLGYRASAKKAQLCQKQVKYLGYLLKEGQRWLTEARKETVMGQPTPKTPRQLREFLGTAGFCRLWIPGFAEMAAPLYPLTKPGTLFNWGPDQQKAYQEIKQALLTAPALGLPDLTKPFELFVDEKQGYAKGVLTQKLGPWRRPVAYLSKKLDPVAAGWPPCLRMVAAIAVLRKDAGKLTMGQPLVILAPHAVEALVKQPPDRWLSNARMTHYQAMLLDTDRVQFGPVVALNPATLLPLPEEGAPHDCLEILAETHGTRPDLTDQPIPDADHTWYTDGSSFLQEGQRKAGAAVTTETEVIWARALPAGTSAQRAELIALTQALKMAEGKRLNVYTDSRYAFATAHIHGEIYRRRGWLTSEGREIKNKSEILALLKALFLPKRLSIIHCLGHQKGDSAEARGNRLADQAAREAAIKTPPDTSTLLAGKRTADGSEFEKRTADGSEFESPKKKAKVE

SEQ ID NO: 7086 - protein, 2096 aa, synthetic construct
MPAAKRVKLDGGDKKYSIGLDIGTNSVGWAVITDEYKVPSKKFKVLGNTDRHSIKKNLIGALLFDSGETAEATRLKRTARRRYTRRKNRICYLQEIFSNEMAKVDDSFFHRLEESFLVEEDKKHERHPIFGNIVDEVAYHEKYPTIYHLRKKLVDSTDKADLRLIYLALAHMIKFRGHFLIEGDLNPDNSDVDKLFIQLVQTYNQLFEENPINASGVDAKAILSARLSKSRRLENLIAQLPGEKKNGLFGNLIALSLGLTPNFKSNFDLAEDAKLQLSKDTYDDDLDNLLAQIGDQYADLFLAAKNLSDAILLSDILRVNTEITKAPLSASMIKRYDEHHQDLTLLKALVRQQLPEKYKEIFFDQSKNGYAGYIDGGASQEEFYKFIKPILEKMDGTEELLVKLNREDLLRKQRTFDNGSIPHQIHLGELHAILRRQEDFYPFLKDNREKIEKILTFRIPYYVGPLARGNSRFAWMTRKSEETITPWNFEEVVDKGASAQSFIERMTNFDKNLPNEKVLPKHSLLYEYFTVYNELTKVKYVTEGMRKPAFLSGEQKKAIVDLLFKTNRKVTVKQLKEDYFKKIECFDSVEISGVEDRFNASLGTYHDLLKIIKDKDFLDNEENEDILEDIVLTLTLFEDREMIEERLKTYAHLFDDKVMKQLKRRRYTGWGRLSRKLINGIRDKQSGKTILDFLKSDGFANRNFMQLIHDDSLTFKEDIQKAQVSGQGDSLHEHIANLAGSPAIKKGILQTVKVVDELVKVMGRHKPENIVIEMARENQTTQKGQKNSRERMKRIEEGIKELGSQILKEHPVENTQLQNEKLYLYYLQNGRDMYVDQELDINRLSDYDVDHIVPQSFLKDDSIDNKVLTRSDKARGKSDNVPSEEVVKKMKNYWRQLLNAKLITQRKFDNLTKAERGGLSELDKAGFIKRQLVETRQITKHVAQILDSRMNTKYDENDKLIREVKVITLKSKLVSDFRKDFQFYKVREINNYHHAHDAYLNAVVGTALIKKYPKLESEFVYGDYKVYDVRKMIAKSEQEIGKATAKYFFYSNIMNFFKTEITLANGEIRKRPLIETNGETGEIVWDKGRDFATVRKVLSMPQVNIVKKTEVQTGGFSKESILPKRNSDKLIARKKDWDPKKYGGFDSPTVAYSVLVVAKVEKGKSKKLKSVKELLGITIMERSSFEKNPIDFLEAKGYKEVKKDLIIKLPKYSLFELENGRKRMLASAGELQKGNELALPSKYVNFLYLASHYEKLKGSPEDNEQKQLFVEQHKHYLDEIIEQISEFSKRVILADANLDKVLSAYNKHRDKPIREQAENIIHLFTLTNLGAPAAFKYFDTTIDRKRYTSTKEVLDATLIHQSITGLYETRIDLSQLGGDGGGSSEAAAKGGSGGTLGIEDEYRLHETSTEPDVSLGSTWLSDFPQAWAETGGMGLAVRQAPLIIPLKATSTPVSIQQYPMSHEARLGIKPHIQRLLDQGILVPCQSPWNTPLLPVKKPGTNDYRPVQDLREVNKRVEDIHPTVPNPYNLLSGLPPSHQWYTVLDLKDAFFCLRLHPTSQPLFAFEWRDPGMGISGQLTWTRLPQGFKNSPTLFNEALHRDLADFRIQHPDLILLQYVDDILLAATSELDCQQGTRALLQTLGDLGYRASAKKAQICQKQVKYLGYLLREGQRWLTEARKETVMGQPVPKTPRQLREFLGTAGFCRLWIPGFAEMAAPLYPLTKPGTLFSWGPDQQKAYQEIKQALLTAPALGLPDLTKPFELFVDEKQGYAKGVLTQKLGPWRRPVAYLSKKLDPVAAGWPPCLRMVAAIAVLTKDAGKLTMGQPLVILAPHAVEALVKQPPDRWLSNARMTHYQAMLLDTDRVQFGPVVALNPATLLPLPEEGAPHDCLEILAETHGTRPDLTDQPIPDADHTWYTDGSSFLQEGQRKAGAAVTTETEVIWAGALPAGTSAQRAELIALTQALKMAEGKRLNVYTDSRYAFATAHIHGEIYRRRGWLTSEGREIKNKSEILALLKALFLPKRLSIIHCLGHQKGDSAEARGNRLADQAAREAAIKTPPDTSTLLAGKRTADGSEFEKRTADGSEFESPKKKAKVE

SEQ ID NO: 7087 - protein, 2096 aa, synthetic construct
MPAAKRVKLDGGDKKYSIGLDIGTNSVGWAVITDEYKVPSKKFKVLGNTDRHSIKKNLIGALLFDSGETAEATRLKRTARRRYTRRKNRICYLQEIFSNEMAKVDDSFFHRLEESFLVEEDKKHERHPIFGNIVDEVAYHEKYPTIYHLRKKLVDSTDKADLRLIYLALAHMIKFRGHFLIEGDLNPDNSDVDKLFIQLVQTYNQLFEENPINASGVDAKAILSARLSKSRRLENLIAQLPGEKKNGLFGNLIALSLGLTPNFKSNFDLAEDAKLQLSKDTYDDDLDNLLAQIGDQYADLFLAAKNLSDAILLSDILRVNTEITKAPLSASMIKRYDEHHQDLTLLKALVRQQLPEKYKEIFFDQSKNGYAGYIDGGASQEEFYKFIKPILEKMDGTEELLVKLNREDLLRKQRTFDNGSIPHQIHLGELHAILRRQEDFYPFLKDNREKIEKILTFRIPYYVGPLARGNSRFAWMTRKSEETITPWNFEEVVDKGASAQSFIERMTNFDKNLPNEKVLPKHSLLYEYFTVYNELTKVKYVTEGMRKPAFLSGEQKKAIVDLLFKTNRKVTVKQLKEDYFKKIECFDSVEISGVEDRFNASLGTYHDLLKIIKDKDFLDNEENEDILEDIVLTLTLFEDREMIEERLKTYAHLFDDKVMKQLKRRRYTGWGRLSRKLINGIRDKQSGKTILDFLKSDGFANRNFMQLIHDDSLTFKEDIQKAQVSGQGDSLHEHIANLAGSPAIKKGILQTVKVVDELVKVMGRHKPENIVIEMARENQTTQKGQKNSRERMKRIEEGIKELGSQILKEHPVENTQLQNEKLYLYYLQNGRDMYVDQELDINRLSDYDVDHIVPQSFLKDDSIDNKVLTRSDKARGKSDNVPSEEVVKKMKNYWRQLLNAKLITQRKFDNLTKAERGGLSELDKAGFIKRQLVETRQITKHVAQILDSRMNTKYDENDKLIREVKVITLKSKLVSDFRKDFQFYKVREINNYHHAHDAYLNAVVGTALIKKYPKLESEFVYGDYKVYDVRKMIAKSEQEIGKATAKYFFYSNIMNFFKTEITLANGEIRKRPLIETNGETGEIVWDKGRDFATVRKVLSMPQVNIVKKTEVQTGGFSKESILPKRNSDKLIARKKDWDPKKYGGFDSPTVAYSVLVVAKVEKGKSKKLKSVKELLGITIMERSSFEKNPIDFLEAKGYKEVKKDLIIKLPKYSLFELENGRKRMLASAGELQKGNELALPSKYVNFLYLASHYEKLKGSPEDNEQKQLFVEQHKHYLDEIIEQISEFSKRVILADANLDKVLSAYNKHRDKPIREQAENIIHLFTLTNLGAPAAFKYFDTTIDRKRYTSTKEVLDATLIHQSITGLYETRIDLSQLGGDGGGSSEAAAKGGSGGTLNIEDEYRLHETSKGPDVPLGSTWLSDFPQAWAETGGMGLAVRQAPLIIPLKATSTPVSIKQYPMSQEARLGIKPHIQRLLDQGILVPCQSPWNTPLLPVKKPGTNDYRPVQDLREVNKRVEDIHPTVPNPYNLLSGLPPSHQWYTVLDLKDAFFCLRLHPTSQSLFAFEWRDPEMGISGQLTWTRLPQGFKNSPTLFNEALHRDLADFRIQHPDLILLQYVDDLLLAATSELDCQQGTRALLQTLGDLGYRASAKKAQICQKQVKYLGYLLKEGQRWLTEARKETVMGQPTPKTPRQLREFLGTAGFCRLWIPGFAEMAAPLYPLTKPGTLFEWGPDQQKAYQEIKQALLTAPALGLPDLTKPFELFVDEKQGYAKGVLTQKLGPWRRPVAYLSKKLDPVAAGWPPCLRMVAAIAVLTKDAGKLTMGQPLVILAPHAVEALVKQPPDRWLSNARMTHYQALLLDTDRVQFGPIVALNPATLLPLPEEGLQHDCLDILAEAHGTRPDLTDQPLPDADHTWYTDGSSFLQEGQRKAGAAVTTETEVVWAKALPAGTSAQRAELIALTQALKMAEGKKLNVYTDSRYAFATAHIHGEIYRRRGWLTSEGKEIKNKDEILALLKALFLPKRLSIIHCPGHQKGNRAEARGNRMADQAAREVATRETPETSTLLAGKRTADGSEFEKRTADGSEFESPKKKAKVE

SEQ ID NO: 7088 - protein, 2096 aa, synthetic construct
MPAAKRVKLDGGDKKYSIGLDIGTNSVGWAVITDEYKVPSKKFKVLGNTDRHSIKKNLIGALLFDSGETAEATRLKRTARRRYTRRKNRICYLQEIFSNEMAKVDDSFFHRLEESFLVEEDKKHERHPIFGNIVDEVAYHEKYPTIYHLRKKLVDSTDKADLRLIYLALAHMIKFRGHFLIEGDLNPDNSDVDKLFIQLVQTYNQLFEENPINASGVDAKAILSARLSKSRRLENLIAQLPGEKKNGLFGNLIALSLGLTPNFKSNFDLAEDAKLQLSKDTYDDDLDNLLAQIGDQYADLFLAAKNLSDAILLSDILRVNTEITKAPLSASMIKRYDEHHQDLTLLKALVRQQLPEKYKEIFFDQSKNGYAGYIDGGASQEEFYKFIKPILEKMDGTEELLVKLNREDLLRKQRTFDNGSIPHQIHLGELHAILRRQEDFYPFLKDNREKIEKILTFRIPYYVGPLARGNSRFAWMTRKSEETITPWNFEEVVDKGASAQSFIERMTNFDKNLPNEKVLPKHSLLYEYFTVYNELTKVKYVTEGMRKPAFLSGEQKKAIVDLLFKTNRKVTVKQLKEDYFKKIECFDSVEISGVEDRFNASLGTYHDLLKIIKDKDFLDNEENEDILEDIVLTLTLFEDREMIEERLKTYAHLFDDKVMKQLKRRRYTGWGRLSRKLINGIRDKQSGKTILDFLKSDGFANRNFMQLIHDDSLTFKEDIQKAQVSGQGDSLHEHIANLAGSPAIKKGILQTVKVVDELVKVMGRHKPENIVIEMARENQTTQKGQKNSRERMKRIEEGIKELGSQILKEHPVENTQLQNEKLYLYYLQNGRDMYVDQELDINRLSDYDVDHIVPQSFLKDDSIDNKVLTRSDKARGKSDNVPSEEVVKKMKNYWRQLLNAKLITQRKFDNLTKAERGGLSELDKAGFIKRQLVETRQITKHVAQILDSRMNTKYDENDKLIREVKVITLKSKLVSDFRKDFQFYKVREINNYHHAHDAYLNAVVGTALIKKYPKLESEFVYGDYKVYDVRKMIAKSEQEIGKATAKYFFYSNIMNFFKTEITLANGEIRKRPLIETNGETGEIVWDKGRDFATVRKVLSMPQVNIVKKTEVQTGGFSKESILPKRNSDKLIARKKDWDPKKYGGFDSPTVAYSVLVVAKVEKGKSKKLKSVKELLGITIMERSSFEKNPIDFLEAKGYKEVKKDLIIKLPKYSLFELENGRKRMLASAGELQKGNELALPSKYVNFLYLASHYEKLKGSPEDNEQKQLFVEQHKHYLDEIIEQISEFSKRVILADANLDKVLSAYNKHRDKPIREQAENIIHLFTLTNLGAPAAFKYFDTTIDRKRYTSTKEVLDATLIHQSITGLYETRIDLSQLGGDGGGSSEAAAKGGSGGTLNIEDEHRLHETSKEPDVSLGSTWLSDFPQAWAETGGMGLAVRQAPLIIPLKATSTPVSIKQYPMSQEARLGIKPHIQRLLDQGILVPCQSPWNTPLLPVKKPGTNDYRPVQDLREVNKRVEDIHPTVPNPYNLLSGLPPSHQWYTVLDLKDAFFCLRLHPTSQPLFAFEWRDPEMGISGQLTWTRLPQGFKNSPTLFDEALHRDLADFRIQHPDLILLQYVDDLLLAATSELDCQQGTRALLQTLGNLGYRASAKKAQICQKQVKYLGYLLKEGQRWLTEARKETVMGQPTPKTPRQLREFLGTAGFCRLWIPGFAEMAAPLYPLTKTGTLFNWGPDQQKAYQEIKQALLTAPALGLPDLTKPFELFVDEKQGYAKGVLTQKLGPWRRPVAYLSKKLDPVAAGWPPCLRMVAAIAVLTKDAGKLTMGQPLVILAPHAVEALVKQPPDRWLSNARMTHYQALLLDTDRVQFGPVVALNPATLLPLPEEGLQHNCLDILAEAHGTRPDLTDQPLPDADHTWYTDGSSLLQEGQRKAGAAVTTETEVIWAKALPAGTSAQRAELIALTQALKMAEGKKLNVYTDSRYAFATAHIHGEIYRRRGLLTSEGKEIKNKDEILALLKALFLPKRLSIIHCPGHQKGHSAEARGNRMADQAARKAAITETPDTSTLLAGKRTADGSEFEKRTADGSEFESPKKKAKVE

SEQ ID NO: 7089 - protein, 2096 aa, synthetic construct
MPAAKRVKLDGGDKKYSIGLDIGTNSVGWAVITDEYKVPSKKFKVLGNTDRHSIKKNLIGALLFDSGETAEATRLKRTARRRYTRRKNRICYLQEIFSNEMAKVDDSFFHRLEESFLVEEDKKHERHPIFGNIVDEVAYHEKYPTIYHLRKKLVDSTDKADLRLIYLALAHMIKFRGHFLIEGDLNPDNSDVDKLFIQLVQTYNQLFEENPINASGVDAKAILSARLSKSRRLENLIAQLPGEKKNGLFGNLIALSLGLTPNFKSNFDLAEDAKLQLSKDTYDDDLDNLLAQIGDQYADLFLAAKNLSDAILLSDILRVNTEITKAPLSASMIKRYDEHHQDLTLLKALVRQQLPEKYKEIFFDQSKNGYAGYIDGGASQEEFYKFIKPILEKMDGTEELLVKLNREDLLRKQRTFDNGSIPHQIHLGELHAILRRQEDFYPFLKDNREKIEKILTFRIPYYVGPLARGNSRFAWMTRKSEETITPWNFEEVVDKGASAQSFIERMTNFDKNLPNEKVLPKHSLLYEYFTVYNELTKVKYVTEGMRKPAFLSGEQKKAIVDLLFKTNRKVTVKQLKEDYFKKIECFDSVEISGVEDRFNASLGTYHDLLKIIKDKDFLDNEENEDILEDIVLTLTLFEDREMIEERLKTYAHLFDDKVMKQLKRRRYTGWGRLSRKLINGIRDKQSGKTILDFLKSDGFANRNFMQLIHDDSLTFKEDIQKAQVSGQGDSLHEHIANLAGSPAIKKGILQTVKVVDELVKVMGRHKPENIVIEMARENQTTQKGQKNSRERMKRIEEGIKELGSQILKEHPVENTQLQNEKLYLYYLQNGRDMYVDQELDINRLSDYDVDHIVPQSFLKDDSIDNKVLTRSDKARGKSDNVPSEEVVKKMKNYWRQLLNAKLITQRKFDNLTKAERGGLSELDKAGFIKRQLVETRQITKHVAQILDSRMNTKYDENDKLIREVKVITLKSKLVSDFRKDFQFYKVREINNYHHAHDAYLNAVVGTALIKKYPKLESEFVYGDYKVYDVRKMIAKSEQEIGKATAKYFFYSNIMNFFKTEITLANGEIRKRPLIETNGETGEIVWDKGRDFATVRKVLSMPQVNIVKKTEVQTGGFSKESILPKRNSDKLIARKKDWDPKKYGGFDSPTVAYSVLVVAKVEKGKSKKLKSVKELLGITIMERSSFEKNPIDFLEAKGYKEVKKDLIIKLPKYSLFELENGRKRMLASAGELQKGNELALPSKYVNFLYLASHYEKLKGSPEDNEQKQLFVEQHKHYLDEIIEQISEFSKRVILADANLDKVLSAYNKHRDKPIREQAENIIHLFTLTNLGAPAAFKYFDTTIDRKRYTSTKEVLDATLIHQSITGLYETRIDLSQLGGDGGGSSEAAAKGGSGGTLNIEDEHRLHETSKEPDVSLGSTWLSDFPQAWAETGGMGLAVRQAPLIIPLKATSTPVSIKQYPMSQEARLGIKPHIQRLLDQGILVPCQSPWNTPLLPVKKPGTNDYRPVQDLREVNKRVEDIHPTVPNPYNLLSGLPPSHQWYTVLDLKDAFFCLRLHPTSQPLFAFEWRDPEMGISGQLTWTRLPQGFKNSPTLFNEALHRDLADFRIQHPDLILLQYVDDLLLAATSELDCQQGTRALLQTLGNLGYRASAKKAQICQKQVKYLGYLLKEGQRWLTEARKETVMGQPTPKTPRQLREFLGTAGFCRLWIPGFAEMAAPLYPLTKPGTLFNWGPDQQKAYQEIKQALLTAPALGLPDLTKPFELFVDEKQGYAKGVLTQKLGPWRRPVAYLSKKLDPVAAGWPPCLRMVAAIAVLTKDAGKLTMGQPLVILAPHAVEALVKQPPDRWLSNARMTHYQALLLDTDRVQFGPVVALNPATLLPLPEEGLQHNCLDILAEAHGTRPDLTDQPLPDADHTWYTDGSSLLQEGQRKAGAAVTTETEVIWAKALPAGTSAQRAELIALTQALKMAEGKKLNVYTDSRYAFATAHIHGEIYRRRGWLTSEGKEIKNKDEILALLKALFLPKRLSIIHCPGHQKGHSAEARGNRMADQAARKAAITETPDTSTLLAGKRTADGSEFEKRTADGSEFESPKKKAKVE

SEQ ID NO: 7090 - protein, 2087 aa, synthetic construct
MPAAKRVKLDGGDKKYSIGLDIGTNSVGWAVITDEYKVPSKKFKVLGNTDRHSIKKNLIGALLFDSGETAEATRLKRTARRRYTRRKNRICYLQEIFSNEMAKVDDSFFHRLEESFLVEEDKKHERHPIFGNIVDEVAYHEKYPTIYHLRKKLVDSTDKADLRLIYLALAHMIKFRGHFLIEGDLNPDNSDVDKLFIQLVQTYNQLFEENPINASGVDAKAILSARLSKSRRLENLIAQLPGEKKNGLFGNLIALSLGLTPNFKSNFDLAEDAKLQLSKDTYDDDLDNLLAQIGDQYADLFLAAKNLSDAILLSDILRVNTEITKAPLSASMIKRYDEHHQDLTLLKALVRQQLPEKYKEIFFDQSKNGYAGYIDGGASQEEFYKFIKPILEKMDGTEELLVKLNREDLLRKQRTFDNGSIPHQIHLGELHAILRRQEDFYPFLKDNREKIEKILTFRIPYYVGPLARGNSRFAWMTRKSEETITPWNFEEVVDKGASAQSFIERMTNFDKNLPNEKVLPKHSLLYEYFTVYNELTKVKYVTEGMRKPAFLSGEQKKAIVDLLFKTNRKVTVKQLKEDYFKKIECFDSVEISGVEDRFNASLGTYHDLLKIIKDKDFLDNEENEDILEDIVLTLTLFEDREMIEERLKTYAHLFDDKVMKQLKRRRYTGWGRLSRKLINGIRDKQSGKTILDFLKSDGFANRNFMQLIHDDSLTFKEDIQKAQVSGQGDSLHEHIANLAGSPAIKKGILQTVKVVDELVKVMGRHKPENIVIEMARENQTTQKGQKNSRERMKRIEEGIKELGSQILKEHPVENTQLQNEKLYLYYLQNGRDMYVDQELDINRLSDYDVDHIVPQSFLKDDSIDNKVLTRSDKARGKSDNVPSEEVVKKMKNYWRQLLNAKLITQRKFDNLTKAERGGLSELDKAGFIKRQLVETRQITKHVAQILDSRMNTKYDENDKLIREVKVITLKSKLVSDFRKDFQFYKVREINNYHHAHDAYLNAVVGTALIKKYPKLESEFVYGDYKVYDVRKMIAKSEQEIGKATAKYFFYSNIMNFFKTEITLANGEIRKRPLIETNGETGEIVWDKGRDFATVRKVLSMPQVNIVKKTEVQTGGFSKESILPKRNSDKLIARKKDWDPKKYGGFDSPTVAYSVLVVAKVEKGKSKKLKSVKELLGITIMERSSFEKNPIDFLEAKGYKEVKKDLIIKLPKYSLFELENGRKRMLASAGELQKGNELALPSKYVNFLYLASHYEKLKGSPEDNEQKQLFVEQHKHYLDEIIEQISEFSKRVILADANLDKVLSAYNKHRDKPIREQAENIIHLFTLTNLGAPAAFKYFDTTIDRKRYTSTKEVLDATLIHQSITGLYETRIDLSQLGGDGGGSSEAAAKGGSGGVPWLMKKPLQLTVLVPLHEYQERLLQQTALPKEQKELLQKLFLKYDALWQHWENQVGHRRIKPHNIATGTLAPRPQKQYPINPKAKPSIQIVIDDLLKQGVLIQQNSTMNTPVYPVPKPDGKWRMVLDYREVNKTIPLIAAQNQHSAGILSSIYRGKYKTTLDLTNGFWAHPITPESYWLTAFTWQGKQYCWTRLPQGFLNSPALFTADVVDLLKEIPNVQAYVDDIYISHDDPQEHLEQLEKIFSILLNAGYVVSLKKSEIAQREVEFLGFNITKEGRGLTDTFKQKLLNITPPKDLKQLQSILGLLNFARNFIPNYSELVKPLYTIVANANGKFISWTEDNSNQLQHIISVLNQADNLEERNPETRLIIKVNSSPSAGYIRYYNEGSKRPIMYVNYIFSKAEAKFTQTEKLLTTMHKGLIKAMDLAMGQEILVYSPIVSMTKIQRTPLPERKALPVRWITWMTYLEDPRIQFHYDKSLPELQQIPNVTEDVIAKTKHPSEFAMVFYTDGSAIKHPDVNKSHSAGMGIAQVQFIPEYKIVHQWSIPLGDHTAQLAEIAAVEFACKKALKISGPVLIVTDSFYVAESANKELPYWKSNGFLNNKKKPLRHVSKWKSIAECLQLKPDIIIMHEKGHQQPMTTLHTEGNNLADKLATQGSYVVHAGKRTADGSEFEKRTADGSEFESPKKKAKVE

SEQ ID NO: 7091 - protein, 2087 aa, synthetic construct
MPAAKRVKLDGGDKKYSIGLDIGTNSVGWAVITDEYKVPSKKFKVLGNTDRHSIKKNLIGALLFDSGETAEATRLKRTARRRYTRRKNRICYLQEIFSNEMAKVDDSFFHRLEESFLVEEDKKHERHPIFGNIVDEVAYHEKYPTIYHLRKKLVDSTDKADLRLIYLALAHMIKFRGHFLIEGDLNPDNSDVDKLFIQLVQTYNQLFEENPINASGVDAKAILSARLSKSRRLENLIAQLPGEKKNGLFGNLIALSLGLTPNFKSNFDLAEDAKLQLSKDTYDDDLDNLLAQIGDQYADLFLAAKNLSDAILLSDILRVNTEITKAPLSASMIKRYDEHHQDLTLLKALVRQQLPEKYKEIFFDQSKNGYAGYIDGGASQEEFYKFIKPILEKMDGTEELLVKLNREDLLRKQRTFDNGSIPHQIHLGELHAILRRQEDFYPFLKDNREKIEKILTFRIPYYVGPLARGNSRFAWMTRKSEETITPWNFEEVVDKGASAQSFIERMTNFDKNLPNEKVLPKHSLLYEYFTVYNELTKVKYVTEGMRKPAFLSGEQKKAIVDLLFKTNRKVTVKQLKEDYFKKIECFDSVEISGVEDRFNASLGTYHDLLKIIKDKDFLDNEENEDILEDIVLTLTLFEDREMIEERLKTYAHLFDDKVMKQLKRRRYTGWGRLSRKLINGIRDKQSGKTILDFLKSDGFANRNFMQLIHDDSLTFKEDIQKAQVSGQGDSLHEHIANLAGSPAIKKGILQTVKVVDELVKVMGRHKPENIVIEMARENQTTQKGQKNSRERMKRIEEGIKELGSQILKEHPVENTQLQNEKLYLYYLQNGRDMYVDQELDINRLSDYDVDHIVPQSFLKDDSIDNKVLTRSDKARGKSDNVPSEEVVKKMKNYWRQLLNAKLITQRKFDNLTKAERGGLSELDKAGFIKRQLVETRQITKHVAQILDSRMNTKYDENDKLIREVKVITLKSKLVSDFRKDFQFYKVREINNYHHAHDAYLNAVVGTALIKKYPKLESEFVYGDYKVYDVRKMIAKSEQEIGKATAKYFFYSNIMNFFKTEITLANGEIRKRPLIETNGETGEIVWDKGRDFATVRKVLSMPQVNIVKKTEVQTGGFSKESILPKRNSDKLIARKKDWDPKKYGGFDSPTVAYSVLVVAKVEKGKSKKLKSVKELLGITIMERSSFEKNPIDFLEAKGYKEVKKDLIIKLPKYSLFELENGRKRMLASAGELQKGNELALPSKYVNFLYLASHYEKLKGSPEDNEQKQLFVEQHKHYLDEIIEQISEFSKRVILADANLDKVLSAYNKHRDKPIREQAENIIHLFTLTNLGAPAAFKYFDTTIDRKRYTSTKEVLDATLIHQSITGLYETRIDLSQLGGDGGGSSEAAAKGGSGGIPWLMKKPLQLTTLVPLQEYEERLLKQTMLTGSYKEKLQSLFLKYDALWQHWENQVGHRRIKPHHIATGTVNPRPQKQYPINPKAKASIQTVINDLLKQGVLIQQNSIMNTPVYPVPKPDGKWRMVLDYREVNKTIPLIAAQNQHSAGILSSIFRGKYKTTLDLSNGFWAHSITPESYWLTAFTWLGQQYCWTRLPQGFLNSPALFNADVVDLLKEVPNVQVYVDDIYISHDDPREHLEQLEKVFSLLLNAGYVVSLKKSEIAQHEVEFLGFNITKEGRGLTETFKQKLLNITPPRDLKQLQSILGLLNFARNFIPNFSELVKPLYNIIATAPGKYITWTTDNSQQLQNIISMLNSAENLEERNPEVRLIMKVNTSPSAGYIRFYNEFAKRPIMYLNYVYTKAEVKFTNTEKLLTTIHKGLIKALDLGMGQEILVYSPIVSMTKIQKTPLPERKALPIRWITWMSYLEDPRIQFHYDKTLPELQQVPTVTDDIIAKIKHPSEFSMVFYTDGSAIKHPNVNKSHNAGMGIAQVQFKPEFTVINTWSIPLGDHTAQLAEVAAVEFACKKALKIDGPVLIVTDSFYVAESVNKELPYWQSNGFFNNKKKPLKHVSKWKSIADCIQLKPDIIIIHEKGHQPTASTFHTEGNNLADKLATQGSYVVNAGKRTADGSEFEKRTADGSEFESPKKKAKVE

SEQ ID NO: 7092 - protein, 2087 aa, synthetic construct
MPAAKRVKLDGGDKKYSIGLDIGTNSVGWAVITDEYKVPSKKFKVLGNTDRHSIKKNLIGALLFDSGETAEATRLKRTARRRYTRRKNRICYLQEIFSNEMAKVDDSFFHRLEESFLVEEDKKHERHPIFGNIVDEVAYHEKYPTIYHLRKKLVDSTDKADLRLIYLALAHMIKFRGHFLIEGDLNPDNSDVDKLFIQLVQTYNQLFEENPINASGVDAKAILSARLSKSRRLENLIAQLPGEKKNGLFGNLIALSLGLTPNFKSNFDLAEDAKLQLSKDTYDDDLDNLLAQIGDQYADLFLAAKNLSDAILLSDILRVNTEITKAPLSASMIKRYDEHHQDLTLLKALVRQQLPEKYKEIFFDQSKNGYAGYIDGGASQEEFYKFIKPILEKMDGTEELLVKLNREDLLRKQRTFDNGSIPHQIHLGELHAILRRQEDFYPFLKDNREKIEKILTFRIPYYVGPLARGNSRFAWMTRKSEETITPWNFEEVVDKGASAQSFIERMTNFDKNLPNEKVLPKHSLLYEYFTVYNELTKVKYVTEGMRKPAFLSGEQKKAIVDLLFKTNRKVTVKQLKEDYFKKIECFDSVEISGVEDRFNASLGTYHDLLKIIKDKDFLDNEENEDILEDIVLTLTLFEDREMIEERLKTYAHLFDDKVMKQLKRRRYTGWGRLSRKLINGIRDKQSGKTILDFLKSDGFANRNFMQLIHDDSLTFKEDIQKAQVSGQGDSLHEHIANLAGSPAIKKGILQTVKVVDELVKVMGRHKPENIVIEMARENQTTQKGQKNSRERMKRIEEGIKELGSQILKEHPVENTQLQNEKLYLYYLQNGRDMYVDQELDINRLSDYDVDHIVPQSFLKDDSIDNKVLTRSDKARGKSDNVPSEEVVKKMKNYWRQLLNAKLITQRKFDNLTKAERGGLSELDKAGFIKRQLVETRQITKHVAQILDSRMNTKYDENDKLIREVKVITLKSKLVSDFRKDFQFYKVREINNYHHAHDAYLNAVVGTALIKKYPKLESEFVYGDYKVYDVRKMIAKSEQEIGKATAKYFFYSNIMNFFKTEITLANGEIRKRPLIETNGETGEIVWDKGRDFATVRKVLSMPQVNIVKKTEVQTGGFSKESILPKRNSDKLIARKKDWDPKKYGGFDSPTVAYSVLVVAKVEKGKSKKLKSVKELLGITIMERSSFEKNPIDFLEAKGYKEVKKDLIIKLPKYSLFELENGRKRMLASAGELQKGNELALPSKYVNFLYLASHYEKLKGSPEDNEQKQLFVEQHKHYLDEIIEQISEFSKRVILADANLDKVLSAYNKHRDKPIREQAENIIHLFTLTNLGAPAAFKYFDTTIDRKRYTSTKEVLDATLIHQSITGLYETRIDLSQLGGDGGGSSEAAAKGGSGGIPWLMKKPLQLTTLVPLQEYEERLLKQTMLTGSYKEKLQSLFLKYDALWQHWENQVGHRRIKPHHIATGTVNPRPQKQYPINPKAKASIQTVINDLLKQGVLIQQNSIMNTPVYPVPKPDGKWRMVLDYREVNKTIPLIAAQNQHSAGILSSIFRGKYKTTLDLSNGFWAHSITPESYWLTAFTWLGQQYCWTRLPQGFLNSPALFNADVVDLLKEVPNVQVYVDDIYISHDDPREHLEQLEKVFSLLLNAGYVVSLKKSEIAQHEVEFLGFNITKEGRGLTETFKQKLLNITPPRDLKQLQSILGKLNFARNFIPNFSELVKPLYNIIATAPGKYITWTTDNSQQLQNIISMLNSAENLEERNPEVRLIMKVNTSPSAGYIRFYNEFAKRPIMYLNYVYTKAEVKFTNTEKLLTTIHKGLIKALDLGMGQEILVYSPIVSMTKIQKTPLPERKALPIRWITWMSYLEDPRIQFHYDKTLPELQQVPTVTDDIIAKIKHPSEFSMVFYTDGSAIKHPNVNKSHNAGMGIAQVQFKPEFTVINTWSIPLGDHTAQLAEVAAVEFACKKALKIDGPVLIVTDSFYVAESVNKELPYWQSNGFFNNKKKPLKHVSKWKSIADCIQLKPDIIIIHEKGHQPTASTFHTEGNNLADKLATQGSYVVNAGKRTADGSEFEKRTADGSEFESPKKKAKVE

SEQ ID NO: 7093 - protein, 2094 aa, synthetic construct
MPAAKRVKLDGGDKKYSIGLDIGTNSVGWAVITDEYKVPSKKFKVLGNTDRHSIKKNLIGALLFDSGETAEATRLKRTARRRYTRRKNRICYLQEIFSNEMAKVDDSFFHRLEESFLVEEDKKHERHPIFGNIVDEVAYHEKYPTIYHLRKKLVDSTDKADLRLIYLALAHMIKFRGHFLIEGDLNPDNSDVDKLFIQLVQTYNQLFEENPINASGVDAKAILSARLSKSRRLENLIAQLPGEKKNGLFGNLIALSLGLTPNFKSNFDLAEDAKLQLSKDTYDDDLDNLLAQIGDQYADLFLAAKNLSDAILLSDILRVNTEITKAPLSASMIKRYDEHHQDLTLLKALVRQQLPEKYKEIFFDQSKNGYAGYIDGGASQEEFYKFIKPILEKMDGTEELLVKLNREDLLRKQRTFDNGSIPHQIHLGELHAILRRQEDFYPFLKDNREKIEKILTFRIPYYVGPLARGNSRFAWMTRKSEETITPWNFEEVVDKGASAQSFIERMTNFDKNLPNEKVLPKHSLLYEYFTVYNELTKVKYVTEGMRKPAFLSGEQKKAIVDLLFKTNRKVTVKQLKEDYFKKIECFDSVEISGVEDRFNASLGTYHDLLKIIKDKDFLDNEENEDILEDIVLTLTLFEDREMIEERLKTYAHLFDDKVMKQLKRRRYTGWGRLSRKLINGIRDKQSGKTILDFLKSDGFANRNFMQLIHDDSLTFKEDIQKAQVSGQGDSLHEHIANLAGSPAIKKGILQTVKVVDELVKVMGRHKPENIVIEMARENQTTQKGQKNSRERMKRIEEGIKELGSQILKEHPVENTQLQNEKLYLYYLQNGRDMYVDQELDINRLSDYDVDHIVPQSFLKDDSIDNKVLTRSDKARGKSDNVPSEEVVKKMKNYWRQLLNAKLITQRKFDNLTKAERGGLSELDKAGFIKRQLVETRQITKHVAQILDSRMNTKYDENDKLIREVKVITLKSKLVSDFRKDFQFYKVREINNYHHAHDAYLNAVVGTALIKKYPKLESEFVYGDYKVYDVRKMIAKSEQEIGKATAKYFFYSNIMNFFKTEITLANGEIRKRPLIETNGETGEIVWDKGRDFATVRKVLSMPQVNIVKKTEVQTGGFSKESILPKRNSDKLIARKKDWDPKKYGGFDSPTVAYSVLVVAKVEKGKSKKLKSVKELLGITIMERSSFEKNPIDFLEAKGYKEVKKDLIIKLPKYSLFELENGRKRMLASAGELQKGNELALPSKYVNFLYLASHYEKLKGSPEDNEQKQLFVEQHKHYLDEIIEQISEFSKRVILADANLDKVLSAYNKHRDKPIREQAENIIHLFTLTNLGAPAAFKYFDTTIDRKRYTSTKEVLDATLIHQSITGLYETRIDLSQLGGDGGGSSEAAAKGGSGGVLNLEEEYRLHEKPVPSSIDPSWLQLFPTVWAERAGMGLANQVPPVVVELRSGASPVAVRQYPMSKEAREGIRPHIQRFLDLGVLVPCQSPWNTPLLPVKKPGTNDYRPVQDLREINKRVQDIHPTVPNPYNLLSSLPPSHTWYSVLDLKDAFFCLKLHPNSQPLFAFEWRDPEKGNTGQLTWTRLPQGFKNSPTLFNEALHRDLAPFRALNPQVVLLQYVDDLLVAAPTYRDCKEGTQKLLQELSKLGYRVSAKKAQLCQKEVTYLGYLLKEGKRWLTPARKATVMKIPPPTTPRQVREFLGKAGFCRLFIPGFASLAAPLYPLTKPSIPFIWTEEHQKAFDRIKEALLSAPALALPDLTKPFTLYVDERAGVARGVLTQTLGPWRRPVAYLSKKLDPVASGWPTCLKAVAAVALLLKDADKLTLGQNVTVIASHSLESIVRQPPDRWMTNARMTHYQSLLLNERVSFAPPAVLNPATLLPVESEATPVHRCSEILAEETGTRRDLKDQPLPGVPAWYTDGSSFIAEGKRRAGAAIVDGKRTVWASSLPEGTSAQKAELVALTQALRLAEGKDINIYTDSRYAFATAHIHGAIYKQRGWLTSAGKDIKNKEEILALLEAIHLPKRVAIIHCPGHQKGNDPVATGNRRADEAAKQAALSTRVLAETTKPAGKRTADGSEFEKRTADGSEFESPKKKAKVE

SEQ ID NO: 7094 - protein, 2096 aa, synthetic construct
MPAAKRVKLDGGDKKYSIGLDIGTNSVGWAVITDEYKVPSKKFKVLGNTDRHSIKKNLIGALLFDSGETAEATRLKRTARRRYTRRKNRICYLQEIFSNEMAKVDDSFFHRLEESFLVEEDKKHERHPIFGNIVDEVAYHEKYPTIYHLRKKLVDSTDKADLRLIYLALAHMIKFRGHFLIEGDLNPDNSDVDKLFIQLVQTYNQLFEENPINASGVDAKAILSARLSKSRRLENLIAQLPGEKKNGLFGNLIALSLGLTPNFKSNFDLAEDAKLQLSKDTYDDDLDNLLAQIGDQYADLFLAAKNLSDAILLSDILRVNTEITKAPLSASMIKRYDEHHQDLTLLKALVRQQLPEKYKEIFFDQSKNGYAGYIDGGASQEEFYKFIKPILEKMDGTEELLVKLNREDLLRKQRTFDNGSIPHQIHLGELHAILRRQEDFYPFLKDNREKIEKILTFRIPYYVGPLARGNSRFAWMTRKSEETITPWNFEEVVDKGASAQSFIERMTNFDKNLPNEKVLPKHSLLYEYFTVYNELTKVKYVTEGMRKPAFLSGEQKKAIVDLLFKTNRKVTVKQLKEDYFKKIECFDSVEISGVEDRFNASLGTYHDLLKIIKDKDFLDNEENEDILEDIVLTLTLFEDREMIEERLKTYAHLFDDKVMKQLKRRRYTGWGRLSRKLINGIRDKQSGKTILDFLKSDGFANRNFMQLIHDDSLTFKEDIQKAQVSGQGDSLHEHIANLAGSPAIKKGILQTVKVVDELVKVMGRHKPENIVIEMARENQTTQKGQKNSRERMKRIEEGIKELGSQILKEHPVENTQLQNEKLYLYYLQNGRDMYVDQELDINRLSDYDVDHIVPQSFLKDDSIDNKVLTRSDKARGKSDNVPSEEVVKKMKNYWRQLLNAKLITQRKFDNLTKAERGGLSELDKAGFIKRQLVETRQITKHVAQILDSRMNTKYDENDKLIREVKVITLKSKLVSDFRKDFQFYKVREINNYHHAHDAYLNAVVGTALIKKYPKLESEFVYGDYKVYDVRKMIAKSEQEIGKATAKYFFYSNIMNFFKTEITLANGEIRKRPLIETNGETGEIVWDKGRDFATVRKVLSMPQVNIVKKTEVQTGGFSKESILPKRNSDKLIARKKDWDPKKYGGFDSPTVAYSVLVVAKVEKGKSKKLKSVKELLGITIMERSSFEKNPIDFLEAKGYKEVKKDLIIKLPKYSLFELENGRKRMLASAGELQKGNELALPSKYVNFLYLASHYEKLKGSPEDNEQKQLFVEQHKHYLDEIIEQISEFSKRVILADANLDKVLSAYNKHRDKPIREQAENIIHLFTLTNLGAPAAFKYFDTTIDRKRYTSTKEVLDATLIHQSITGLYETRIDLSQLGGDGGGSSEAAAKGGSGGTLNIEDEYRLHETSKEPDVPLGSTWLSDFPQAWAETGGMGLAVRQAPLIIPLKATSTPVSIKQYPMSQEARLGIKPHIQRLLDQGILVPCQSPWNTPLLPVKKPGTNDYRPVQDLREVNKRVEDIHPTVPNPYNLLSGLPPSHQWYTVLDLKDAFFCLRLHPTSQPLFAFEWRDPEMGISGQLTWTRLPQGFKNSPTLFDEALHRDLADFRIQHPDLILLQYVDDLLLAATSEQDCQRGTRALLQTLGNLGYRASAKKAQICQKQVKYLGYLLKEGQRWLTEARKETVMGQPTPKTPRQLREFLGTAGFCRLWIPGFAEMAAPLYPLTKTGTLFNWGPDQQKAYQEIKQALLTAPALGLPDLTKPFELFVDEKQGYAKGVLTQKLGPWRRPVAYLSKKLDPVAAGWPPCLRMVAAIAVLTKDAGKLTMGQPLVILAPHAVEALVKQPPDRWLSNARMTHYQAMLLDTDRVQFGPVVALNPATLLPLPEKEAPHDCLEILAETHGTRPDLTDQPIPDADYTWYTDGSSFLQEGQRRAGAAVTTETEVIWARALPAGTSAQRAELIALTQALKMAEGKKLNVYTDSRYAFATAHVHGEIYRRRGLLTSEGREIKNKNEILALLKALFLPKRLSIIHCPGHQKGNSAEARGNRMADQAAREAAMKAVLETSTLLAGKRTADGSEFEKRTADGSEFESPKKKAKVE

SEQ ID NO: 7095 - protein, 2096 aa, synthetic construct
MPAAKRVKLDGGDKKYSIGLDIGTNSVGWAVITDEYKVPSKKFKVLGNTDRHSIKKNLIGALLFDSGETAEATRLKRTARRRYTRRKNRICYLQEIFSNEMAKVDDSFFHRLEESFLVEEDKKHERHPIFGNIVDEVAYHEKYPTIYHLRKKLVDSTDKADLRLIYLALAHMIKFRGHFLIEGDLNPDNSDVDKLFIQLVQTYNQLFEENPINASGVDAKAILSARLSKSRRLENLIAQLPGEKKNGLFGNLIALSLGLTPNFKSNFDLAEDAKLQLSKDTYDDDLDNLLAQIGDQYADLFLAAKNLSDAILLSDILRVNTEITKAPLSASMIKRYDEHHQDLTLLKALVRQQLPEKYKEIFFDQSKNGYAGYIDGGASQEEFYKFIKPILEKMDGTEELLVKLNREDLLRKQRTFDNGSIPHQIHLGELHAILRRQEDFYPFLKDNREKIEKILTFRIPYYVGPLARGNSRFAWMTRKSEETITPWNFEEVVDKGASAQSFIERMTNFDKNLPNEKVLPKHSLLYEYFTVYNELTKVKYVTEGMRKPAFLSGEQKKAIVDLLFKTNRKVTVKQLKEDYFKKIECFDSVEISGVEDRFNASLGTYHDLLKIIKDKDFLDNEENEDILEDIVLTLTLFEDREMIEERLKTYAHLFDDKVMKQLKRRRYTGWGRLSRKLINGIRDKQSGKTILDFLKSDGFANRNFMQLIHDDSLTFKEDIQKAQVSGQGDSLHEHIANLAGSPAIKKGILQTVKVVDELVKVMGRHKPENIVIEMARENQTTQKGQKNSRERMKRIEEGIKELGSQILKEHPVENTQLQNEKLYLYYLQNGRDMYVDQELDINRLSDYDVDHIVPQSFLKDDSIDNKVLTRSDKARGKSDNVPSEEVVKKMKNYWRQLLNAKLITQRKFDNLTKAERGGLSELDKAGFIKRQLVETRQITKHVAQILDSRMNTKYDENDKLIREVKVITLKSKLVSDFRKDFQFYKVREINNYHHAHDAYLNAVVGTALIKKYPKLESEFVYGDYKVYDVRKMIAKSEQEIGKATAKYFFYSNIMNFFKTEITLANGEIRKRPLIETNGETGEIVWDKGRDFATVRKVLSMPQVNIVKKTEVQTGGFSKESILPKRNSDKLIARKKDWDPKKYGGFDSPTVAYSVLVVAKVEKGKSKKLKSVKELLGITIMERSSFEKNPIDFLEAKGYKEVKKDLIIKLPKYSLFELENGRKRMLASAGELQKGNELALPSKYVNFLYLASHYEKLKGSPEDNEQKQLFVEQHKHYLDEIIEQISEFSKRVILADANLDKVLSAYNKHRDKPIREQAENIIHLFTLTNLGAPAAFKYFDTTIDRKRYTSTKEVLDATLIHQSITGLYETRIDLSQLGGDGGGSSEAAAKGGSGGTLNIEDEYRLHETSKEPDVPLGSTWLSDFPQAWAETGGMGLAVRQAPLIIPLKATSTPVSIKQYPMSQEARLGIKPHIQRLLDQGILVPCQSPWNTPLLPVKKPGTNDYRPVQDLREVNKRVEDIHPTVPNPYNLLSGLPPSHQWYTVLDLKDAFFCLRLHPTSQPLFAFEWRDPEMGISGQLTWTRLPQGFKNSPTLFNEALHRDLADFRIQHPDLILLQYVDDLLLAATSEQDCQRGTRALLQTLGNLGYRASAKKAQICQKQVKYLGYLLKEGQRWLTEARKETVMGQPTPKTPRQLREFLGTAGFCRLWIPGFAEMAAPLYPLTKPGTLFNWGPDQQKAYQEIKQALLTAPALGLPDLTKPFELFVDEKQGYAKGVLTQKLGPWRRPVAYLSKKLDPVAAGWPPCLRMVAAIAVLTKDAGKLTMGQPLVILAPHAVEALVKQPPDRWLSNARMTHYQAMLLDTDRVQFGPVVALNPATLLPLPEKEAPHDCLEILAETHGTRPDLTDQPIPDADYTWYTDGSSFLQEGQRRAGAAVTTETEVIWARALPAGTSAQRAELIALTQALKMAEGKKLNVYTDSRYAFATAHVHGEIYRRRGWLTSEGREIKNKNEILALLKALFLPKRLSIIHCPGHQKGNSAEARGNRMADQAAREAAMKAVLETSTLLAGKRTADGSEFEKRTADGSEFESPKKKAKVE

SEQ ID NO: 7096 - protein, 2098 aa, synthetic construct
MPAAKRVKLDGGDKKYSIGLDIGTNSVGWAVITDEYKVPSKKFKVLGNTDRHSIKKNLIGALLFDSGETAEATRLKRTARRRYTRRKNRICYLQEIFSNEMAKVDDSFFHRLEESFLVEEDKKHERHPIFGNIVDEVAYHEKYPTIYHLRKKLVDSTDKADLRLIYLALAHMIKFRGHFLIEGDLNPDNSDVDKLFIQLVQTYNQLFEENPINASGVDAKAILSARLSKSRRLENLIAQLPGEKKNGLFGNLIALSLGLTPNFKSNFDLAEDAKLQLSKDTYDDDLDNLLAQIGDQYADLFLAAKNLSDAILLSDILRVNTEITKAPLSASMIKRYDEHHQDLTLLKALVRQQLPEKYKEIFFDQSKNGYAGYIDGGASQEEFYKFIKPILEKMDGTEELLVKLNREDLLRKQRTFDNGSIPHQIHLGELHAILRRQEDFYPFLKDNREKIEKILTFRIPYYVGPLARGNSRFAWMTRKSEETITPWNFEEVVDKGASAQSFIERMTNFDKNLPNEKVLPKHSLLYEYFTVYNELTKVKYVTEGMRKPAFLSGEQKKAIVDLLFKTNRKVTVKQLKEDYFKKIECFDSVEISGVEDRFNASLGTYHDLLKIIKDKDFLDNEENEDILEDIVLTLTLFEDREMIEERLKTYAHLFDDKVMKQLKRRRYTGWGRLSRKLINGIRDKQSGKTILDFLKSDGFANRNFMQLIHDDSLTFKEDIQKAQVSGQGDSLHEHIANLAGSPAIKKGILQTVKVVDELVKVMGRHKPENIVIEMARENQTTQKGQKNSRERMKRIEEGIKELGSQILKEHPVENTQLQNEKLYLYYLQNGRDMYVDQELDINRLSDYDVDHIVPQSFLKDDSIDNKVLTRSDKARGKSDNVPSEEVVKKMKNYWRQLLNAKLITQRKFDNLTKAERGGLSELDKAGFIKRQLVETRQITKHVAQILDSRMNTKYDENDKLIREVKVITLKSKLVSDFRKDFQFYKVREINNYHHAHDAYLNAVVGTALIKKYPKLESEFVYGDYKVYDVRKMIAKSEQEIGKATAKYFFYSNIMNFFKTEITLANGEIRKRPLIETNGETGEIVWDKGRDFATVRKVLSMPQVNIVKKTEVQTGGFSKESILPKRNSDKLIARKKDWDPKKYGGFDSPTVAYSVLVVAKVEKGKSKKLKSVKELLGITIMERSSFEKNPIDFLEAKGYKEVKKDLIIKLPKYSLFELENGRKRMLASAGELQKGNELALPSKYVNFLYLASHYEKLKGSPEDNEQKQLFVEQHKHYLDEIIEQISEFSKRVILADANLDKVLSAYNKHRDKPIREQAENIIHLFTLTNLGAPAAFKYFDTTIDRKRYTSTKEVLDATLIHQSITGLYETRIDLSQLGGDGGEAAAKGGSGSSGGTAPLEEEYRLFLEAPIQNVTLLEQWKREIPKVWAEINPPGLASTQAPIHVQLLSTALPVRVRQYPITLEAKRSLRETIRKFRAAGILRPVHSPWNTPLLPVRKSGTSEYRMVQDLREVNKRVETIHPTVPNPYTLLSLLPPDRIWYSVLDLKDAFFCIPLAPESQLIFAFEWADAEEGESGQLTWTRLPQGFKNSPTLFNEALNRDLQGFRLDHPSVSLLQYVDDLLIAADTQAACLSATRDLLMTLAELGYRVSGKKAQLCQEEVTYLGFKIHKGSRSLSNSRTQAILQIPVPKTKRQVREFLGTIGYCRLWIPGFAELAQPLYAATRPGNDPLVWGEKEEEAFQSLKLALTQPPALALPSLDKPFQLFVEETSGAAKGVLTQALGPWKRPVAYLSKRLDPVAAGWPRCLRAIAAAALLTREASKLTFGQDIEITSSHNLESLLRSPPDKWLTNARITQYQVLLLDPPRVRFKQTAALNPATLLPETDDTLPIHHCLDTLDSLTSTRPDLTDQPLAQAEATLFTDGSSYIRDGKRYAGAAVVTLDSVIWAEPLPIGTSAQKAELIALTKALEWSKDKSVNIYTDSRYAFATLHVHGMIYRERGWLTAGGKAIKNAPEILALLTAVWLPKRVAVMHCKGHQKDDAPTSTGNRRADEVAREVAIRPLSTQATISAGKRTADGSEFEKRTADGSEFESPKKKAKVE

SEQ ID NO: 7097 - protein, 2102 aa, synthetic construct
MPAAKRVKLDGGDKKYSIGLDIGTNSVGWAVITDEYKVPSKKFKVLGNTDRHSIKKNLIGALLFDSGETAEATRLKRTARRRYTRRKNRICYLQEIFSNEMAKVDDSFFHRLEESFLVEEDKKHERHPIFGNIVDEVAYHEKYPTIYHLRKKLVDSTDKADLRLIYLALAHMIKFRGHFLIEGDLNPDNSDVDKLFIQLVQTYNQLFEENPINASGVDAKAILSARLSKSRRLENLIAQLPGEKKNGLFGNLIALSLGLTPNFKSNFDLAEDAKLQLSKDTYDDDLDNLLAQIGDQYADLFLAAKNLSDAILLSDILRVNTEITKAPLSASMIKRYDEHHQDLTLLKALVRQQLPEKYKEIFFDQSKNGYAGYIDGGASQEEFYKFIKPILEKMDGTEELLVKLNREDLLRKQRTFDNGSIPHQIHLGELHAILRRQEDFYPFLKDNREKIEKILTFRIPYYVGPLARGNSRFAWMTRKSEETITPWNFEEVVDKGASAQSFIERMTNFDKNLPNEKVLPKHSLLYEYFTVYNELTKVKYVTEGMRKPAFLSGEQKKAIVDLLFKTNRKVTVKQLKEDYFKKIECFDSVEISGVEDRFNASLGTYHDLLKIIKDKDFLDNEENEDILEDIVLTLTLFEDREMIEERLKTYAHLFDDKVMKQLKRRRYTGWGRLSRKLINGIRDKQSGKTILDFLKSDGFANRNFMQLIHDDSLTFKEDIQKAQVSGQGDSLHEHIANLAGSPAIKKGILQTVKVVDELVKVMGRHKPENIVIEMARENQTTQKGQKNSRERMKRIEEGIKELGSQILKEHPVENTQLQNEKLYLYYLQNGRDMYVDQELDINRLSDYDVDHIVPQSFLKDDSIDNKVLTRSDKARGKSDNVPSEEVVKKMKNYWRQLLNAKLITQRKFDNLTKAERGGLSELDKAGFIKRQLVETRQITKHVAQILDSRMNTKYDENDKLIREVKVITLKSKLVSDFRKDFQFYKVREINNYHHAHDAYLNAVVGTALIKKYPKLESEFVYGDYKVYDVRKMIAKSEQEIGKATAKYFFYSNIMNFFKTEITLANGEIRKRPLIETNGETGEIVWDKGRDFATVRKVLSMPQVNIVKKTEVQTGGFSKESILPKRNSDKLIARKKDWDPKKYGGFDSPTVAYSVLVVAKVEKGKSKKLKSVKELLGITIMERSSFEKNPIDFLEAKGYKEVKKDLIIKLPKYSLFELENGRKRMLASAGELQKGNELALPSKYVNFLYLASHYEKLKGSPEDNEQKQLFVEQHKHYLDEIIEQISEFSKRVILADANLDKVLSAYNKHRDKPIREQAENIIHLFTLTNLGAPAAFKYFDTTIDRKRYTSTKEVLDATLIHQSITGLYETRIDLSQLGGDGGEAAAKGGSGSSGGTVSLQDEHRLFDIPVTTSLPDVWLQDFPQAWAETGGLGRAKCQAPIIIDLKPTAVPVSIKQYPMSLEAHMGIRQHIIKFLELGVLRPCRSPWNTPLLPVKKPGTQDYRPVQDLREINKRTVDIHPTVPNPYNLLSTLKPDYSWYTVLDLKDAFFCLPLAPQSQELFAFEWKDPERGISGQLTWTRLPQGFKNSPTLFNEALHRDLTDFRTQHPEVTLLQYVDDLLLAAPTKKACTQGTRHLLQELGEKGYRASAKKAQICQTKVTYLGYILSEGKRWLTPGRIETVARIPPPRNPREVREFLGTAGFCRLWIPGFAELAAPLYALTKPSTPFTWQTEHQLAFEALKKALLSAPALGLPDTSKPFTLFLDERQGIAKGVLTQKLGPWKRPVAYLSKKLDPVAAGWPPCLRIMAATAMLVKDSAKLTLGQPLTVITPHTLEAIVRQPPDRWITNARLTHYQALLLDTDRVQFGPPVTLNPATLLPVPENQPSPHDCRQVLAETHGTREDLKDQELPDADHTWYTDGSSYLDSGTRRAGAAVVDGHNTIWAQSLPPGTSAQKAELIALTKALELSKGKKANIYTDSRYAFATAHTHGSIYERRGWLTSEGKEIKNKAEIIALLKALFLPQEVAIIHCPGHQKGQDPVAVGNRQADRVARQAAMAEVLTLATEPDNTSHITAGKRTADGSEFEKRTADGSEFESPKKKAKVE

SEQ ID NO: 7098 - protein, 2218 aa, synthetic construct
MPAAKRVKLDGGDKKYSIGLDIGTNSVGWAVITDEYKVPSKKFKVLGNTDRHSIKKNLIGALLFDSGETAEATRLKRTARRRYTRRKNRICYLQEIFSNEMAKVDDSFFHRLEESFLVEEDKKHERHPIFGNIVDEVAYHEKYPTIYHLRKKLVDSTDKADLRLIYLALAHMIKFRGHFLIEGDLNPDNSDVDKLFIQLVQTYNQLFEENPINASGVDAKAILSARLSKSRRLENLIAQLPGEKKNGLFGNLIALSLGLTPNFKSNFDLAEDAKLQLSKDTYDDDLDNLLAQIGDQYADLFLAAKNLSDAILLSDILRVNTEITKAPLSASMIKRYDEHHQDLTLLKALVRQQLPEKYKEIFFDQSKNGYAGYIDGGASQEEFYKFIKPILEKMDGTEELLVKLNREDLLRKQRTFDNGSIPHQIHLGELHAILRRQEDFYPFLKDNREKIEKILTFRIPYYVGPLARGNSRFAWMTRKSEETITPWNFEEVVDKGASAQSFIERMTNFDKNLPNEKVLPKHSLLYEYFTVYNELTKVKYVTEGMRKPAFLSGEQKKAIVDLLFKTNRKVTVKQLKEDYFKKIECFDSVEISGVEDRFNASLGTYHDLLKIIKDKDFLDNEENEDILEDIVLTLTLFEDREMIEERLKTYAHLFDDKVMKQLKRRRYTGWGRLSRKLINGIRDKQSGKTILDFLKSDGFANRNFMQLIHDDSLTFKEDIQKAQVSGQGDSLHEHIANLAGSPAIKKGILQTVKVVDELVKVMGRHKPENIVIEMARENQTTQKGQKNSRERMKRIEEGIKELGSQILKEHPVENTQLQNEKLYLYYLQNGRDMYVDQELDINRLSDYDVDHIVPQSFLKDDSIDNKVLTRSDKARGKSDNVPSEEVVKKMKNYWRQLLNAKLITQRKFDNLTKAERGGLSELDKAGFIKRQLVETRQITKHVAQILDSRMNTKYDENDKLIREVKVITLKSKLVSDFRKDFQFYKVREINNYHHAHDAYLNAVVGTALIKKYPKLESEFVYGDYKVYDVRKMIAKSEQEIGKATAKYFFYSNIMNFFKTEITLANGEIRKRPLIETNGETGEIVWDKGRDFATVRKVLSMPQVNIVKKTEVQTGGFSKESILPKRNSDKLIARKKDWDPKKYGGFDSPTVAYSVLVVAKVEKGKSKKLKSVKELLGITIMERSSFEKNPIDFLEAKGYKEVKKDLIIKLPKYSLFELENGRKRMLASAGELQKGNELALPSKYVNFLYLASHYEKLKGSPEDNEQKQLFVEQHKHYLDEIIEQISEFSKRVILADANLDKVLSAYNKHRDKPIREQAENIIHLFTLTNLGAPAAFKYFDTTIDRKRYTSTKEVLDATLIHQSITGLYETRIDLSQLGGDGGEAAAKGGSGSSGGTLGDQGSRGSDPLPEPRVTLTVEGIPTEFLVNTGAEHSVLTKPMGKMGSKRTVVAGATGSKVYPWTTKRLLKIGQKQVTHSFLVIPECPAPLLGRDLLTKLKAQIQFSTEGPQVTWEDRPAMCLVLNLEEEYRLHEKPVPPSIDPSWLQLFPMVWAEKAGMGLANQVPPVVVELKSDASPVAVRQYPMSKEAREGIRPHIQRFLDLGILVPCQSPWNTPLLPVKKPGTNDYRPVQDLREVNKRVQDIHPTVPNPYNLLSSLPPSHTWYSVLDLKDAFFCLKLHPNSQPLFAFEWRDPEKGNTGQLTWTRLPQGFKNSPTLFNEALHRDLASFRALNPQVVMLQYVDDLLVAAPTYRDCKEGTRRLLQELSKLGYRVSAKKAQLCREEVTYLGYLLKGGKRWLTPARKATVMKIPTPTTPRQVREFLGTAGFCRLWIPGFASLAAPLYPLTRPKVPFTWTEAHQEAFGRIKEALLSAPALALPDLTKPFALYVDEKEGVARGVLTQTLGPWRRPVAYLSKKLDPVASGWPTCLKAIAAVALLLKDADKLTLGQNVLVIAPHNLESIVRQPPDRWMTNARMTHYQSLLLNERVSFAPPAILNPATLLPVESDDTPIHICSEILAEETGTRPDLRDQPLPGVPAWYTDGSSFIMDGRRQAGAAIVDNKRTVWASNLPEGTSAQKAELIALTQALRLAEGKSINIYTDSRYAFATAHVHGAIYKQRGWLTSAGKDIKNKEEILALLEAIHLPKRVAIIHCPGHQRGTDPVATGNRKADEAAKQAAQSTRILTETTKNAGKRTADGSEFEKRTADGSEFESPKKKAKVE

SEQ ID NO: 7099 - protein, 2218 aa, synthetic construct
MPAAKRVKLDGGDKKYSIGLDIGTNSVGWAVITDEYKVPSKKFKVLGNTDRHSIKKNLIGALLFDSGETAEATRLKRTARRRYTRRKNRICYLQEIFSNEMAKVDDSFFHRLEESFLVEEDKKHERHPIFGNIVDEVAYHEKYPTIYHLRKKLVDSTDKADLRLIYLALAHMIKFRGHFLIEGDLNPDNSDVDKLFIQLVQTYNQLFEENPINASGVDAKAILSARLSKSRRLENLIAQLPGEKKNGLFGNLIALSLGLTPNFKSNFDLAEDAKLQLSKDTYDDDLDNLLAQIGDQYADLFLAAKNLSDAILLSDILRVNTEITKAPLSASMIKRYDEHHQDLTLLKALVRQQLPEKYKEIFFDQSKNGYAGYIDGGASQEEFYKFIKPILEKMDGTEELLVKLNREDLLRKQRTFDNGSIPHQIHLGELHAILRRQEDFYPFLKDNREKIEKILTFRIPYYVGPLARGNSRFAWMTRKSEETITPWNFEEVVDKGASAQSFIERMTNFDKNLPNEKVLPKHSLLYEYFTVYNELTKVKYVTEGMRKPAFLSGEQKKAIVDLLFKTNRKVTVKQLKEDYFKKIECFDSVEISGVEDRFNASLGTYHDLLKIIKDKDFLDNEENEDILEDIVLTLTLFEDREMIEERLKTYAHLFDDKVMKQLKRRRYTGWGRLSRKLINGIRDKQSGKTILDFLKSDGFANRNFMQLIHDDSLTFKEDIQKAQVSGQGDSLHEHIANLAGSPAIKKGILQTVKVVDELVKVMGRHKPENIVIEMARENQTTQKGQKNSRERMKRIEEGIKELGSQILKEHPVENTQLQNEKLYLYYLQNGRDMYVDQELDINRLSDYDVDHIVPQSFLKDDSIDNKVLTRSDKARGKSDNVPSEEVVKKMKNYWRQLLNAKLITQRKFDNLTKAERGGLSELDKAGFIKRQLVETRQITKHVAQILDSRMNTKYDENDKLIREVKVITLKSKLVSDFRKDFQFYKVREINNYHHAHDAYLNAVVGTALIKKYPKLESEFVYGDYKVYDVRKMIAKSEQEIGKATAKYFFYSNIMNFFKTEITLANGEIRKRPLIETNGETGEIVWDKGRDFATVRKVLSMPQVNIVKKTEVQTGGFSKESILPKRNSDKLIARKKDWDPKKYGGFDSPTVAYSVLVVAKVEKGKSKKLKSVKELLGITIMERSSFEKNPIDFLEAKGYKEVKKDLIIKLPKYSLFELENGRKRMLASAGELQKGNELALPSKYVNFLYLASHYEKLKGSPEDNEQKQLFVEQHKHYLDEIIEQISEFSKRVILADANLDKVLSAYNKHRDKPIREQAENIIHLFTLTNLGAPAAFKYFDTTIDRKRYTSTKEVLDATLIHQSITGLYETRIDLSQLGGDGGEAAAKGGSGSSGGTLGDQGSRGSDPLPEPRVTLTVEGIPTEFLVNTGAEHSVLTKPMGKMGSKRTVVAGATGSKVYPWTTKRLLKIGQKQVTHSFLVIPECPAPLLGRDLLTKLKAQIQFSTEGPQVTWEDRPAMCLVLNLEEEYRLHEKPVPPSIDPSWLQLFPMVWAEKAGMGLANQVPPVVVELKSDASPVAVRQYPMSKEAREGIRPHIQRFLDLGILVPCQSPWNTPLLPVKKPGTNDYRPVQDLREVNKRVQDIHPTVPNPYNLLSSLPPSHTWYSVLDLKDAFFCLKLHPNSQPLFAFEWRDPEKGNTGQLTWTRLPQGFKNSPTLFNEALHRDLASFRALNPQVVMLQYVDDLLVAAPTYRDCKEGTRRLLQELSKLGYRVSAKKAQLCREEVTYLGYLLKGGKRWLTPARKATVMKIPTPTTPRQVREFLGKAGFCRLFIPGFASLAAPLYPLTRPKVPFTWTEAHQEAFGRIKEALLSAPALALPDLTKPFALYVDEKEGVARGVLTQTLGPWRRPVAYLSKKLDPVASGWPTCLKAIAAVALLLKDADKLTLGQNVLVIAPHNLESIVRQPPDRWMTNARMTHYQSLLLNERVSFAPPAILNPATLLPVESDDTPIHICSEILAEETGTRPDLRDQPLPGVPAWYTDGSSFIMDGRRQAGAAIVDNKRTVWASNLPEGTSAQKAELIALTQALRLAEGKSINIYTDSRYAFATAHVHGAIYKQRGWLTSAGKDIKNKEEILALLEAIHLPKRVAIIHCPGHQRGTDPVATGNRKADEAAKQAAQSTRILTETTKNAGKRTADGSEFEKRTADGSEFESPKKKAKVE

SEQ ID NO: 7100 - protein, 2096 aa, synthetic construct
MPAAKRVKLDGGDKKYSIGLDIGTNSVGWAVITDEYKVPSKKFKVLGNTDRHSIKKNLIGALLFDSGETAEATRLKRTARRRYTRRKNRICYLQEIFSNEMAKVDDSFFHRLEESFLVEEDKKHERHPIFGNIVDEVAYHEKYPTIYHLRKKLVDSTDKADLRLIYLALAHMIKFRGHFLIEGDLNPDNSDVDKLFIQLVQTYNQLFEENPINASGVDAKAILSARLSKSRRLENLIAQLPGEKKNGLFGNLIALSLGLTPNFKSNFDLAEDAKLQLSKDTYDDDLDNLLAQIGDQYADLFLAAKNLSDAILLSDILRVNTEITKAPLSASMIKRYDEHHQDLTLLKALVRQQLPEKYKEIFFDQSKNGYAGYIDGGASQEEFYKFIKPILEKMDGTEELLVKLNREDLLRKQRTFDNGSIPHQIHLGELHAILRRQEDFYPFLKDNREKIEKILTFRIPYYVGPLARGNSRFAWMTRKSEETITPWNFEEVVDKGASAQSFIERMTNFDKNLPNEKVLPKHSLLYEYFTVYNELTKVKYVTEGMRKPAFLSGEQKKAIVDLLFKTNRKVTVKQLKEDYFKKIECFDSVEISGVEDRFNASLGTYHDLLKIIKDKDFLDNEENEDILEDIVLTLTLFEDREMIEERLKTYAHLFDDKVMKQLKRRRYTGWGRLSRKLINGIRDKQSGKTILDFLKSDGFANRNFMQLIHDDSLTFKEDIQKAQVSGQGDSLHEHIANLAGSPAIKKGILQTVKVVDELVKVMGRHKPENIVIEMARENQTTQKGQKNSRERMKRIEEGIKELGSQILKEHPVENTQLQNEKLYLYYLQNGRDMYVDQELDINRLSDYDVDHIVPQSFLKDDSIDNKVLTRSDKARGKSDNVPSEEVVKKMKNYWRQLLNAKLITQRKFDNLTKAERGGLSELDKAGFIKRQLVETRQITKHVAQILDSRMNTKYDENDKLIREVKVITLKSKLVSDFRKDFQFYKVREINNYHHAHDAYLNAVVGTALIKKYPKLESEFVYGDYKVYDVRKMIAKSEQEIGKATAKYFFYSNIMNFFKTEITLANGEIRKRPLIETNGETGEIVWDKGRDFATVRKVLSMPQVNIVKKTEVQTGGFSKESILPKRNSDKLIARKKDWDPKKYGGFDSPTVAYSVLVVAKVEKGKSKKLKSVKELLGITIMERSSFEKNPIDFLEAKGYKEVKKDLIIKLPKYSLFELENGRKRMLASAGELQKGNELALPSKYVNFLYLASHYEKLKGSPEDNEQKQLFVEQHKHYLDEIIEQISEFSKRVILADANLDKVLSAYNKHRDKPIREQAENIIHLFTLTNLGAPAAFKYFDTTIDRKRYTSTKEVLDATLIHQSITGLYETRIDLSQLGGDGGEAAAKGGSGSSGGTLNLEDEYRLYETSAEPEVSPGSTWLSDFPQAWAETGGMGLAVRQAPLIIPLKATSTPVSIKQYPMSQEAKLGIKPHIQRLLDQGILVPCQSPWNTPLLPVKKPGTNDYRPVQDLREVNKRVEDIHPTVPNPYNLLSGLPPSHRWYTVLDLKDAFFCLRLHPTSQPLFAFEWRDPGMGISGQLTWTRLPQGFKNSPTLFNEALHRDLADFRIQHPDLILLQYVDDILLAATSELDCQQGTRALLLTLGNLGYRASAKKAQLCQKQVKYLGYLLKEGQRWLTEARKETVMGQPTPKTPRQLREFLGKAGFCRLFIPGFAEMAAPLYPLTKPGTLFNWGPDQQKAYQEIKQALLTAPALGLPDLTKPFELFVDEKQGYAKGVLTQKLGPWRRPVAYLSKKLDPVAAGWPPCLRMVAAIAVLRKDAGKLTMGQPLVILAPHAVEALVKQPPDRWLSNARMTHYQAMLLDTDRVQFGPVVALNPATLLPLPEEGAPHDCLEILAETHGTRPDLTDQPIPDADHTWYTDGSSFLQEGQRKAGAAVTTETEVIWARALPAGTSAQRAELIALTQALKMAEGKRLNVYTDSRYAFATAHIHGEIYRRRGWLTSEGREIKNKSEILALLKALFLPKRLSIIHCLGHQKGDSAEARGNRLADQAAREAAIKTPPDTSTLLAGKRTADGSEFEKRTADGSEFESPKKKAKVE

SEQ ID NO: 7101 - protein, 2096 aa, synthetic construct
MPAAKRVKLDGGDKKYSIGLDIGTNSVGWAVITDEYKVPSKKFKVLGNTDRHSIKKNLIGALLFDSGETAEATRLKRTARRRYTRRKNRICYLQEIFSNEMAKVDDSFFHRLEESFLVEEDKKHERHPIFGNIVDEVAYHEKYPTIYHLRKKLVDSTDKADLRLIYLALAHMIKFRGHFLIEGDLNPDNSDVDKLFIQLVQTYNQLFEENPINASGVDAKAILSARLSKSRRLENLIAQLPGEKKNGLFGNLIALSLGLTPNFKSNFDLAEDAKLQLSKDTYDDDLDNLLAQIGDQYADLFLAAKNLSDAILLSDILRVNTEITKAPLSASMIKRYDEHHQDLTLLKALVRQQLPEKYKEIFFDQSKNGYAGYIDGGASQEEFYKFIKPILEKMDGTEELLVKLNREDLLRKQRTFDNGSIPHQIHLGELHAILRRQEDFYPFLKDNREKIEKILTFRIPYYVGPLARGNSRFAWMTRKSEETITPWNFEEVVDKGASAQSFIERMTNFDKNLPNEKVLPKHSLLYEYFTVYNELTKVKYVTEGMRKPAFLSGEQKKAIVDLLFKTNRKVTVKQLKEDYFKKIECFDSVEISGVEDRFNASLGTYHDLLKIIKDKDFLDNEENEDILEDIVLTLTLFEDREMIEERLKTYAHLFDDKVMKQLKRRRYTGWGRLSRKLINGIRDKQSGKTILDFLKSDGFANRNFMQLIHDDSLTFKEDIQKAQVSGQGDSLHEHIANLAGSPAIKKGILQTVKVVDELVKVMGRHKPENIVIEMARENQTTQKGQKNSRERMKRIEEGIKELGSQILKEHPVENTQLQNEKLYLYYLQNGRDMYVDQELDINRLSDYDVDHIVPQSFLKDDSIDNKVLTRSDKARGKSDNVPSEEVVKKMKNYWRQLLNAKLITQRKFDNLTKAERGGLSELDKAGFIKRQLVETRQITKHVAQILDSRMNTKYDENDKLIREVKVITLKSKLVSDFRKDFQFYKVREINNYHHAHDAYLNAVVGTALIKKYPKLESEFVYGDYKVYDVRKMIAKSEQEIGKATAKYFFYSNIMNFFKTEITLANGEIRKRPLIETNGETGEIVWDKGRDFATVRKVLSMPQVNIVKKTEVQTGGFSKESILPKRNSDKLIARKKDWDPKKYGGFDSPTVAYSVLVVAKVEKGKSKKLKSVKELLGITIMERSSFEKNPIDFLEAKGYKEVKKDLIIKLPKYSLFELENGRKRMLASAGELQKGNELALPSKYVNFLYLASHYEKLKGSPEDNEQKQLFVEQHKHYLDEIIEQISEFSKRVILADANLDKVLSAYNKHRDKPIREQAENIIHLFTLTNLGAPAAFKYFDTTIDRKRYTSTKEVLDATLIHQSITGLYETRIDLSQLGGDGGEAAAKGGSGSSGGTLNIEDEYRLHETSKGPDVPLGSTWLSDFPQAWAETGGMGLAVRQAPLIIPLKATSTPVSIKQYPMSQEARLGIKPHIQRLLDQGILVPCQSPWNTPLLPVKKPGTNDYRPVQDLREVNKRVEDIHPTVPNPYNLLSGLPPSHQWYTVLDLKDAFFCLRLHPTSQSLFAFEWRDPEMGISGQLTWTRLPQGFKNSPTLFDEALHRDLADFRIQHPDLILLQYVDDLLLAATSELDCQQGTRALLQTLGDLGYRASAKKAQICQKQVKYLGYLLKEGQRWLTEARKETVMGQPTPKTPRQLREFLGTAGFCRLWIPGFAEMAAPLYPLTKTGTLFEWGPDQQKAYQEIKQALLTAPALGLPDLTKPFELFVDEKQGYAKGVLTQKLGPWRRPVAYLSKKLDPVAAGWPPCLRMVAAIAVLTKDAGKLTMGQPLVILAPHAVEALVKQPPDRWLSNARMTHYQALLLDTDRVQFGPIVALNPATLLPLPEEGLQHDCLDILAEAHGTRPDLTDQPLPDADHTWYTDGSSFLQEGQRKAGAAVTTETEVVWAKALPAGTSAQRAELIALTQALKMAEGKKLNVYTDSRYAFATAHIHGEIYRRRGLLTSEGKEIKNKDEILALLKALFLPKRLSIIHCPGHQKGNRAEARGNRMADQAAREVATRETPETSTLLAGKRTADGSEFEKRTADGSEFESPKKKAKVE

SEQ ID NO: 7102 - protein, 2087 aa, synthetic construct
MPAAKRVKLDGGDKKYSIGLDIGTNSVGWAVITDEYKVPSKKFKVLGNTDRHSIKKNLIGALLFDSGETAEATRLKRTARRRYTRRKNRICYLQEIFSNEMAKVDDSFFHRLEESFLVEEDKKHERHPIFGNIVDEVAYHEKYPTIYHLRKKLVDSTDKADLRLIYLALAHMIKFRGHFLIEGDLNPDNSDVDKLFIQLVQTYNQLFEENPINASGVDAKAILSARLSKSRRLENLIAQLPGEKKNGLFGNLIALSLGLTPNFKSNFDLAEDAKLQLSKDTYDDDLDNLLAQIGDQYADLFLAAKNLSDAILLSDILRVNTEITKAPLSASMIKRYDEHHQDLTLLKALVRQQLPEKYKEIFFDQSKNGYAGYIDGGASQEEFYKFIKPILEKMDGTEELLVKLNREDLLRKQRTFDNGSIPHQIHLGELHAILRRQEDFYPFLKDNREKIEKILTFRIPYYVGPLARGNSRFAWMTRKSEETITPWNFEEVVDKGASAQSFIERMTNFDKNLPNEKVLPKHSLLYEYFTVYNELTKVKYVTEGMRKPAFLSGEQKKAIVDLLFKTNRKVTVKQLKEDYFKKIECFDSVEISGVEDRFNASLGTYHDLLKIIKDKDFLDNEENEDILEDIVLTLTLFEDREMIEERLKTYAHLFDDKVMKQLKRRRYTGWGRLSRKLINGIRDKQSGKTILDFLKSDGFANRNFMQLIHDDSLTFKEDIQKAQVSGQGDSLHEHIANLAGSPAIKKGILQTVKVVDELVKVMGRHKPENIVIEMARENQTTQKGQKNSRERMKRIEEGIKELGSQILKEHPVENTQLQNEKLYLYYLQNGRDMYVDQELDINRLSDYDVDHIVPQSFLKDDSIDNKVLTRSDKARGKSDNVPSEEVVKKMKNYWRQLLNAKLITQRKFDNLTKAERGGLSELDKAGFIKRQLVETRQITKHVAQILDSRMNTKYDENDKLIREVKVITLKSKLVSDFRKDFQFYKVREINNYHHAHDAYLNAVVGTALIKKYPKLESEFVYGDYKVYDVRKMIAKSEQEIGKATAKYFFYSNIMNFFKTEITLANGEIRKRPLIETNGETGEIVWDKGRDFATVRKVLSMPQVNIVKKTEVQTGGFSKESILPKRNSDKLIARKKDWDPKKYGGFDSPTVAYSVLVVAKVEKGKSKKLKSVKELLGITIMERSSFEKNPIDFLEAKGYKEVKKDLIIKLPKYSLFELENGRKRMLASAGELQKGNELALPSKYVNFLYLASHYEKLKGSPEDNEQKQLFVEQHKHYLDEIIEQISEFSKRVILADANLDKVLSAYNKHRDKPIREQAENIIHLFTLTNLGAPAAFKYFDTTIDRKRYTSTKEVLDATLIHQSITGLYETRIDLSQLGGDGGEAAAKGGSGSSGGIPWLMKKPLQLTTLVPLQEYEERLLKQTMLTGSYKEKLQSLFLKYDALWQHWENQVGHRRIKPHHIATGTVNPRPQKQYPINPKAKASIQTVINDLLKQGVLIQQNSIMNTPVYPVPKPDGKWRMVLDYREVNKTIPLIAAQNQHSAGILSSIFRGKYKTTLDLSNGFWAHSITPESYWLTAFTWLGQQYCWTRLPQGFLNSPALFNADVVDLLKEVPNVQVYVDDIYISHDDPREHLEQLEKVFSLLLNAGYVVSLKKSEIAQHEVEFLGFNITKEGRGLTETFKQKLLNITPPRDLKQLQSILGLLNFARNFIPNFSELVKPLYNIIATAPGKYITWTTDNSQQLQNIISMLNSAENLEERNPEVRLIMKVNTSPSAGYIRFYNEFAKRPIMYLNYVYTKAEVKFTNTEKLLTTIHKGLIKALDLGMGQEILVYSPIVSMTKIQKTPLPERKALPIRWITWMSYLEDPRIQFHYDKTLPELQQVPTVTDDIIAKIKHPSEFSMVFYTDGSAIKHPNVNKSHNAGMGIAQVQFKPEFTVINTWSIPLGDHTAQLAEVAAVEFACKKALKIDGPVLIVTDSFYVAESVNKELPYWQSNGFFNNKKKPLKHVSKWKSIADCIQLKPDIIIIHEKGHQPTASTFHTEGNNLADKLATQGSYVVNAGKRTADGSEFEKRTADGSEFESPKKKAKVE

SEQ ID NO: 7103 - protein, 2096 aa, synthetic construct; identical to SEQ ID NO: 4523

SEQ ID NO: 7104 - protein, 2098 aa, synthetic construct
MPAAKRVKLDGGDKKYSIGLDIGTNSVGWAVITDEYKVPSKKFKVLGNTDRHSIKKNLIGALLFDSGETAEATRLKRTARRRYTRRKNRICYLQEIFSNEMAKVDDSFFHRLEESFLVEEDKKHERHPIFGNIVDEVAYHEKYPTIYHLRKKLVDSTDKADLRLIYLALAHMIKFRGHFLIEGDLNPDNSDVDKLFIQLVQTYNQLFEENPINASGVDAKAILSARLSKSRRLENLIAQLPGEKKNGLFGNLIALSLGLTPNFKSNFDLAEDAKLQLSKDTYDDDLDNLLAQIGDQYADLFLAAKNLSDAILLSDILRVNTEITKAPLSASMIKRYDEHHQDLTLLKALVRQQLPEKYKEIFFDQSKNGYAGYIDGGASQEEFYKFIKPILEKMDGTEELLVKLNREDLLRKQRTFDNGSIPHQIHLGELHAILRRQEDFYPFLKDNREKIEKILTFRIPYYVGPLARGNSRFAWMTRKSEETITPWNFEEVVDKGASAQSFIERMTNFDKNLPNEKVLPKHSLLYEYFTVYNELTKVKYVTEGMRKPAFLSGEQKKAIVDLLFKTNRKVTVKQLKEDYFKKIECFDSVEISGVEDRFNASLGTYHDLLKIIKDKDFLDNEENEDILEDIVLTLTLFEDREMIEERLKTYAHLFDDKVMKQLKRRRYTGWGRLSRKLINGIRDKQSGKTILDFLKSDGFANRNFMQLIHDDSLTFKEDIQKAQVSGQGDSLHEHIANLAGSPAIKKGILQTVKVVDELVKVMGRHKPENIVIEMARENQTTQKGQKNSRERMKRIEEGIKELGSQILKEHPVENTQLQNEKLYLYYLQNGRDMYVDQELDINRLSDYDVDHIVPQSFLKDDSIDNKVLTRSDKARGKSDNVPSEEVVKKMKNYWRQLLNAKLITQRKFDNLTKAERGGLSELDKAGFIKRQLVETRQITKHVAQILDSRMNTKYDENDKLIREVKVITLKSKLVSDFRKDFQFYKVREINNYHHAHDAYLNAVVGTALIKKYPKLESEFVYGDYKVYDVRKMIAKSEQEIGKATAKYFFYSNIMNFFKTEITLANGEIRKRPLIETNGETGEIVWDKGRDFATVRKVLSMPQVNIVKKTEVQTGGFSKESILPKRNSDKLIARKKDWDPKKYGGFDSPTVAYSVLVVAKVEKGKSKKLKSVKELLGITIMERSSFEKNPIDFLEAKGYKEVKKDLIIKLPKYSLFELENGRKRMLASAGELQKGNELALPSKYVNFLYLASHYEKLKGSPEDNEQKQLFVEQHKHYLDEIIEQISEFSKRVILADANLDKVLSAYNKHRDKPIREQAENIIHLFTLTNLGAPAAFKYFDTTIDRKRYTSTKEVLDATLIHQSITGLYETRIDLSQLGGDGGEAAAKGSSGGSGGTAPLEEEYRLFLEAPIQNVTLLEQWKREIPKVWAEINPPGLASTQAPIHVQLLSTALPVRVRQYPITLEAKRSLRETIRKFRAAGILRPVHSPWNTPLLPVRKSGTSEYRMVQDLREVNKRVETIHPTVPNPYTLLSLLPPDRIWYSVLDLKDAFFCIPLAPESQLIFAFEWADAEEGESGQLTWTRLPQGFKNSPTLFNEALNRDLQGFRLDHPSVSLLQYVDDLLIAADTQAACLSATRDLLMTLAELGYRVSGKKAQLCQEEVTYLGFKIHKGSRSLSNSRTQAILQIPVPKTKRQVREFLGTIGYCRLWIPGFAELAQPLYAATRPGNDPLVWGEKEEEAFQSLKLALTQPPALALPSLDKPFQLFVEETSGAAKGVLTQALGPWKRPVAYLSKRLDPVAAGWPRCLRAIAAAALLTREASKLTFGQDIEITSSHNLESLLRSPPDKWLTNARITQYQVLLLDPPRVRFKQTAALNPATLLPETDDTLPIHHCLDTLDSLTSTRPDLTDQPLAQAEATLFTDGSSYIRDGKRYAGAAVVTLDSVIWAEPLPIGTSAQKAELIALTKALEWSKDKSVNIYTDSRYAFATLHVHGMIYRERGWLTAGGKAIKNAPEILALLTAVWLPKRVAVMHCKGHQKDDAPTSTGNRRADEVAREVAIRPLSTQATISAGKRTADGSEFEKRTADGSEFESPKKKAKVE

SEQ ID NO: 7105 - protein, 2098 aa, synthetic construct
MPAAKRVKLDGGDKKYSIGLDIGTNSVGWAVITDEYKVPSKKFKVLGNTDRHSIKKNLIGALLFDSGETAEATRLKRTARRRYTRRKNRICYLQEIFSNEMAKVDDSFFHRLEESFLVEEDKKHERHPIFGNIVDEVAYHEKYPTIYHLRKKLVDSTDKADLRLIYLALAHMIKFRGHFLIEGDLNPDNSDVDKLFIQLVQTYNQLFEENPINASGVDAKAILSARLSKSRRLENLIAQLPGEKKNGLFGNLIALSLGLTPNFKSNFDLAEDAKLQLSKDTYDDDLDNLLAQIGDQYADLFLAAKNLSDAILLSDILRVNTEITKAPLSASMIKRYDEHHQDLTLLKALVRQQLPEKYKEIFFDQSKNGYAGYIDGGASQEEFYKFIKPILEKMDGTEELLVKLNREDLLRKQRTFDNGSIPHQIHLGELHAILRRQEDFYPFLKDNREKIEKILTFRIPYYVGPLARGNSRFAWMTRKSEETITPWNFEEVVDKGASAQSFIERMTNFDKNLPNEKVLPKHSLLYEYFTVYNELTKVKYVTEGMRKPAFLSGEQKKAIVDLLFKTNRKVTVKQLKEDYFKKIECFDSVEISGVEDRFNASLGTYHDLLKIIKDKDFLDNEENEDILEDIVLTLTLFEDREMIEERLKTYAHLFDDKVMKQLKRRRYTGWGRLSRKLINGIRDKQSGKTILDFLKSDGFANRNFMQLIHDDSLTFKEDIQKAQVSGQGDSLHEHIANLAGSPAIKKGILQTVKVVDELVKVMGRHKPENIVIEMARENQTTQKGQKNSRERMKRIEEGIKELGSQILKEHPVENTQLQNEKLYLYYLQNGRDMYVDQELDINRLSDYDVDHIVPQSFLKDDSIDNKVLTRSDKARGKSDNVPSEEVVKKMKNYWRQLLNAKLITQRKFDNLTKAERGGLSELDKAGFIKRQLVETRQITKHVAQILDSRMNTKYDENDKLIREVKVITLKSKLVSDFRKDFQFYKVREINNYHHAHDAYLNAVVGTALIKKYPKLESEFVYGDYKVYDVRKMIAKSEQEIGKATAKYFFYSNIMNFFKTEITLANGEIRKRPLIETNGETGEIVWDKGRDFATVRKVLSMPQVNIVKKTEVQTGGFSKESILPKRNSDKLIARKKDWDPKKYGGFDSPTVAYSVLVVAKVEKGKSKKLKSVKELLGITIMERSSFEKNPIDFLEAKGYKEVKKDLIIKLPKYSLFELENGRKRMLASAGELQKGNELALPSKYVNFLYLASHYEKLKGSPEDNEQKQLFVEQHKHYLDEIIEQISEFSKRVILADANLDKVLSAYNKHRDKPIREQAENIIHLFTLTNLGAPAAFKYFDTTIDRKRYTSTKEVLDATLIHQSITGLYETRIDLSQLGGDGGEAAAKGSSGGSGGTAPLEEEYRLFLEAPIQNVTLLEQWKREIPKVWAEINPPGLASTQAPIHVQLLSTALPVRVRQYPITLEAKRSLRETIRKFRAAGILRPVHSPWNTPLLPVRKSGTSEYRMVQDLREVNKRVETIHPTVPNPYTLLSLLPPDRIWYSVLDLKDAFFCIPLAPESQLIFAFEWADAEEGESGQLTWTRLPQGFKNSPTLFNEALNRDLQGFRLDHPSVSLLQYVDDLLIAADTQAACLSATRDLLMTLAELGYRVSGKKAQLCQEEVTYLGFKIHKGSRSLSNSRTQAILQIPVPKTKRQVREFLGKIGYCRLFIPGFAELAQPLYAATRPGNDPLVWGEKEEEAFQSLKLALTQPPALALPSLDKPFQLFVEETSGAAKGVLTQALGPWKRPVAYLSKRLDPVAAGWPRCLRAIAAAALLTREASKLTFGQDIEITSSHNLESLLRSPPDKWLTNARITQYQVLLLDPPRVRFKQTAALNPATLLPETDDTLPIHHCLDTLDSLTSTRPDLTDQPLAQAEATLFTDGSSYIRDGKRYAGAAVVTLDSVIWAEPLPIGTSAQKAELIALTKALEWSKDKSVNIYTDSRYAFATLHVHGMIYRERGWLTAGGKAIKNAPEILALLTAVWLPKRVAVMHCKGHQKDDAPTSTGNRRADEVAREVAIRPLSTQATISAGKRTADGSEFEKRTADGSEFESPKKKAKVE

SEQ ID NO: 7106 - protein, 2102 aa, synthetic construct
MPAAKRVKLDGGDKKYSIGLDIGTNSVGWAVITDEYKVPSKKFKVLGNTDRHSIKKNLIGALLFDSGETAEATRLKRTARRRYTRRKNRICYLQEIFSNEMAKVDDSFFHRLEESFLVEEDKKHERHPIFGNIVDEVAYHEKYPTIYHLRKKLVDSTDKADLRLIYLALAHMIKFRGHFLIEGDLNPDNSDVDKLFIQLVQTYNQLFEENPINASGVDAKAILSARLSKSRRLENLIAQLPGEKKNGLFGNLIALSLGLTPNFKSNFDLAEDAKLQLSKDTYDDDLDNLLAQIGDQYADLFLAAKNLSDAILLSDILRVNTEITKAPLSASMIKRYDEHHQDLTLLKALVRQQLPEKYKEIFFDQSKNGYAGYIDGGASQEEFYKFIKPILEKMDGTEELLVKLNREDLLRKQRTFDNGSIPHQIHLGELHAILRRQEDFYPFLKDNREKIEKILTFRIPYYVGPLARGNSRFAWMTRKSEETITPWNFEEVVDKGASAQSFIERMTNFDKNLPNEKVLPKHSLLYEYFTVYNELTKVKYVTEGMRKPAFLSGEQKKAIVDLLFKTNRKVTVKQLKEDYFKKIECFDSVEISGVEDRFNASLGTYHDLLKIIKDKDFLDNEENEDILEDIVLTLTLFEDREMIEERLKTYAHLFDDKVMKQLKRRRYTGWGRLSRKLINGIRDKQSGKTILDFLKSDGFANRNFMQLIHDDSLTFKEDIQKAQVSGQGDSLHEHIANLAGSPAIKKGILQTVKVVDELVKVMGRHKPENIVIEMARENQTTQKGQKNSRERMKRIEEGIKELGSQILKEHPVENTQLQNEKLYLYYLQNGRDMYVDQELDINRLSDYDVDHIVPQSFLKDDSIDNKVLTRSDKARGKSDNVPSEEVVKKMKNYWRQLLNAKLITQRKFDNLTKAERGGLSELDKAGFIKRQLVETRQITKHVAQILDSRMNTKYDENDKLIREVKVITLKSKLVSDFRKDFQFYKVREINNYHHAHDAYLNAVVGTALIKKYPKLESEFVYGDYKVYDVRKMIAKSEQEIGKATAKYFFYSNIMNFFKTEITLANGEIRKRPLIETNGETGEIVWDKGRDFATVRKVLSMPQVNIVKKTEVQTGGFSKESILPKRNSDKLIARKKDWDPKKYGGFDSPTVAYSVLVVAKVEKGKSKKLKSVKELLGITIMERSSFEKNPIDFLEAKGYKEVKKDLIIKLPKYSLFELENGRKRMLASAGELQKGNELALPSKYVNFLYLASHYEKLKGSPEDNEQKQLFVEQHKHYLDEIIEQISEFSKRVILADANLDKVLSAYNKHRDKPIREQAENIIHLFTLTNLGAPAAFKYFDTTIDRKRYTSTKEVLDATLIHQSITGLYETRIDLSQLGGDGGEAAAKGSSGGSGGTVSLQDEHRLFDIPVTTSLPDVWLQDFPQAWAETGGLGRAKCQAPIIIDLKPTAVPVSIKQYPMSLEAHMGIRQHIIKFLELGVLRPCRSPWNTPLLPVKKPGTQDYRPVQDLREINKRTVDIHPTVPNPYNLLSTLKPDYSWYTVLDLKDAFFCLPLAPQSQELFAFEWKDPERGISGQLTWTRLPQGFKNSPTLFNEALHRDLTDFRTQHPEVTLLQYVDDLLLAAPTKKACTQGTRHLLQELGEKGYRASAKKAQICQTKVTYLGYILSEGKRWLTPGRIETVARIPPPRNPREVREFLGKAGFCRLFIPGFAELAAPLYALTKPSTPFTWQTEHQLAFEALKKALLSAPALGLPDTSKPFTLFLDERQGIAKGVLTQKLGPWKRPVAYLSKKLDPVAAGWPPCLRIMAATAMLVKDSAKLTLGQPLTVITPHTLEAIVRQPPDRWITNARLTHYQALLLDTDRVQFGPPVTLNPATLLPVPENQPSPHDCRQVLAETHGTREDLKDQELPDADHTWYTDGSSYLDSGTRRAGAAVVDGHNTIWAQSLPPGTSAQKAELIALTKALELSKGKKANIYTDSRYAFATAHTHGSIYERRGWLTSEGKEIKNKAEIIALLKALFLPQEVAIIHCPGHQKGQDPVAVGNRQADRVARQAAMAEVLTLATEPDNTSHITAGKRTADGSEFEKRTADGSEFESPKKKAKVE

SEQ ID NO: 7107 - protein, 2087 aa, synthetic construct
MPAAKRVKLDGGDKKYSIGLDIGTNSVGWAVITDEYKVPSKKFKVLGNTDRHSIKKNLIGALLFDSGETAEATRLKRTARRRYTRRKNRICYLQEIFSNEMAKVDDSFFHRLEESFLVEEDKKHERHPIFGNIVDEVAYHEKYPTIYHLRKKLVDSTDKADLRLIYLALAHMIKFRGHFLIEGDLNPDNSDVDKLFIQLVQTYNQLFEENPINASGVDAKAILSARLSKSRRLENLIAQLPGEKKNGLFGNLIALSLGLTPNFKSNFDLAEDAKLQLSKDTYDDDLDNLLAQIGDQYADLFLAAKNLSDAILLSDILRVNTEITKAPLSASMIKRYDEHHQDLTLLKALVRQQLPEKYKEIFFDQSKNGYAGYIDGGASQEEFYKFIKPILEKMDGTEELLVKLNREDLLRKQRTFDNGSIPHQIHLGELHAILRRQEDFYPFLKDNREKIEKILTFRIPYYVGPLARGNSRFAWMTRKSEETITPWNFEEVVDKGASAQSFIERMTNFDKNLPNEKVLPKHSLLYEYFTVYNELTKVKYVTEGMRKPAFLSGEQKKAIVDLLFKTNRKVTVKQLKEDYFKKIECFDSVEISGVEDRFNASLGTYHDLLKIIKDKDFLDNEENEDILEDIVLTLTLFEDREMIEERLKTYAHLFDDKVMKQLKRRRYTGWGRLSRKLINGIRDKQSGKTILDFLKSDGFANRNFMQLIHDDSLTFKEDIQKAQVSGQGDSLHEHIANLAGSPAIKKGILQTVKVVDELVKVMGRHKPENIVIEMARENQTTQKGQKNSRERMKRIEEGIKELGSQILKEHPVENTQLQNEKLYLYYLQNGRDMYVDQELDINRLSDYDVDHIVPQSFLKDDSIDNKVLTRSDKARGKSDNVPSEEVVKKMKNYWRQLLNAKLITQRKFDNLTKAERGGLSELDKAGFIKRQLVETRQITKHVAQILDSRMNTKYDENDKLIREVKVITLKSKLVSDFRKDFQFYKVREINNYHHAHDAYLNAVVGTALIKKYPKLESEFVYGDYKVYDVRKMIAKSEQEIGKATAKYFFYSNIMNFFKTEITLANGEIRKRPLIETNGETGEIVWDKGRDFATVRKVLSMPQVNIVKKTEVQTGGFSKESILPKRNSDKLIARKKDWDPKKYGGFDSPTVAYSVLVVAKVEKGKSKKLKSVKELLGITIMERSSFEKNPIDFLEAKGYKEVKKDLIIKLPKYSLFELENGRKRMLASAGELQKGNELALPSKYVNFLYLASHYEKLKGSPEDNEQKQLFVEQHKHYLDEIIEQISEFSKRVILADANLDKVLSAYNKHRDKPIREQAENIIHLFTLTNLGAPAAFKYFDTTIDRKRYTSTKEVLDATLIHQSITGLYETRIDLSQLGGDGGEAAAKGSSGGSGGVPWILKKPLELTIKLDLEEQQGTLLNNSILSKKGKEELKQLFEKYSALWQSWENQVGHRRIRPHKIATGTVKPTPQKQYHINPKAKPDIQIVINDLLKQGVLIQKESTMNTPVYPVPKPNGRWRMVLDYRAVNKVTPLIAVQNQHSYGILGSLFKGRYKTTIDLSNGFWAHPIVPEDYWITAFTWQGKQYCWTVLPQGFLNSPGLFTGDVVDLLQGIPNVEVYVDDVYISHDSEKEHLEYLDILFNRLKEAGYIISLKKSNIANSIVDFLGFQITNEGRGLTDTFKEKLENITAPTTLKQLQSILGLLNFARNFIPDFTELIAPLYALIPKSTKNYVPWQIEHSTTLETLITKLNGAEYLQGRKGDKTLIMKVNASYTTGYIRYYNEGEKKPISYVSIVFSKTELKFTELEKLLTTVHKGLLKALDLSMGQNIHVYSPIVSMQNIQKTPQTAKKALASRWLSWLSYLEDPRIRFFYDPQMPALKDLPAVDTGKDNKKHPSNFQHIFYTDGSAITSPTKEGHLNAGMGIVYFINKDGNLQKQQEWSISLGNHTAQFAEIAAFEFALKKCLPLGGNILVVTDSNYVAKAYNEELDVWASNGFVNNRKKPLKHISKWKSVADLKRLRPDVVVTHEPGHQKLDSSPHAYGNNLADQLATQASFKVHAGKRTADGSEFEKRTADGSEFESPKKKAKVE

SEQ ID NO: 7108 - protein, 2087 aa, synthetic construct
MPAAKRVKLDGGDKKYSIGLDIGTNSVGWAVITDEYKVPSKKFKVLGNTDRHSIKKNLIGALLFDSGETAEATRLKRTARRRYTRRKNRICYLQEIFSNEMAKVDDSFFHRLEESFLVEEDKKHERHPIFGNIVDEVAYHEKYPTIYHLRKKLVDSTDKADLRLIYLALAHMIKFRGHFLIEGDLNPDNSDVDKLFIQLVQTYNQLFEENPINASGVDAKAILSARLSKSRRLENLIAQLPGEKKNGLFGNLIALSLGLTPNFKSNFDLAEDAKLQLSKDTYDDDLDNLLAQIGDQYADLFLAAKNLSDAILLSDILRVNTEITKAPLSASMIKRYDEHHQDLTLLKALVRQQLPEKYKEIFFDQSKNGYAGYIDGGASQEEFYKFIKPILEKMDGTEELLVKLNREDLLRKQRTFDNGSIPHQIHLGELHAILRRQEDFYPFLKDNREKIEKILTFRIPYYVGPLARGNSRFAWMTRKSEETITPWNFEEVVDKGASAQSFIERMTNFDKNLPNEKVLPKHSLLYEYFTVYNELTKVKYVTEGMRKPAFLSGEQKKAIVDLLFKTNRKVTVKQLKEDYFKKIECFDSVEISGVEDRFNASLGTYHDLLKIIKDKDFLDNEENEDILEDIVLTLTLFEDREMIEERLKTYAHLFDDKVMKQLKRRRYTGWGRLSRKLINGIRDKQSGKTILDFLKSDGFANRNFMQLIHDDSLTFKEDIQKAQVSGQGDSLHEHIANLAGSPAIKKGILQTVKVVDELVKVMGRHKPENIVIEMARENQTTQKGQKNSRERMKRIEEGIKELGSQILKEHPVENTQLQNEKLYLYYLQNGRDMYVDQELDINRLSDYDVDHIVPQSFLKDDSIDNKVLTRSDKARGKSDNVPSEEVVKKMKNYWRQLLNAKLITQRKFDNLTKAERGGLSELDKAGFIKRQLVETRQITKHVAQILDSRMNTKYDENDKLIREVKVITLKSKLVSDFRKDFQFYKVREINNYHHAHDAYLNAVVGTALIKKYPKLESEFVYGDYKVYDVRKMIAKSEQEIGKATAKYFFYSNIMNFFKTEITLANGEIRKRPLIETNGETGEIVWDKGRDFATVRKVLSMPQVNIVKKTEVQTGGFSKESILPKRNSDKLIARKKDWDPKKYGGFDSPTVAYSVLVVAKVEKGKSKKLKSVKELLGITIMERSSFEKNPIDFLEAKGYKEVKKDLIIKLPKYSLFELENGRKRMLASAGELQKGNELALPSKYVNFLYLASHYEKLKGSPEDNEQKQLFVEQHKHYLDEIIEQISEFSKRVILADANLDKVLSAYNKHRDKPIREQAENIIHLFTLTNLGAPAAFKYFDTTIDRKRYTSTKEVLDATLIHQSITGLYETRIDLSQLGGDGGEAAAKGSSGGSGGVPWILKKPLELTIKLDLEEQQGTLLNNSILSKKGKEELKQLFEKYSALWQSWENQVGHRRIRPHKIATGTVKPTPQKQYHINPKAKPDIQIVINDLLKQGVLIQKESTMNTPVYPVPKPNGRWRMVLDYRAVNKVTPLIAVQNQHSYGILGSLFKGRYKTTIDLSNGFWAHPIVPEDYWITAFTWQGKQYCWTVLPQGFLNSPGLFNGDVVDLLQGIPNVEVYVDDVYISHDSEKEHLEYLDILFNRLKEAGYIISLKKSNIANSIVDFLGFQITNEGRGLTDTFKEKLENITAPTTLKQLQSILGKLNFARNFIPDFTELIAPLYALIPKSPKNYVPWQIEHSTTLETLITKLNGAEYLQGRKGDKTLIMKVNASYTTGYIRYYNEGEKKPISYVSIVFSKTELKFTELEKLLTTVHKGLLKALDLSMGQNIHVYSPIVSMQNIQKTPQTAKKALASRWLSWLSYLEDPRIRFFYDPQMPALKDLPAVDTGKDNKKHPSNFQHIFYTDGSAITSPTKEGHLNAGMGIVYFINKDGNLQKQQEWSISLGNHTAQFAEIAAFEFALKKCLPLGGNILVVTDSNYVAKAYNEELDVWASNGFVNNRKKPLKHISKWKSVADLKRLRPDVVVTHEPGHQKLDSSPHAYGNNLADQLATQASFKVHAGKRTADGSEFEKRTADGSEFESPKKKAKVE

SEQ ID NO: 7109 - protein, 2094 aa, synthetic construct
MPAAKRVKLDGGDKKYSIGLDIGTNSVGWAVITDEYKVPSKKFKVLGNTDRHSIKKNLIGALLFDSGETAEATRLKRTARRRYTRRKNRICYLQEIFSNEMAKVDDSFFHRLEESFLVEEDKKHERHPIFGNIVDEVAYHEKYPTIYHLRKKLVDSTDKADLRLIYLALAHMIKFRGHFLIEGDLNPDNSDVDKLFIQLVQTYNQLFEENPINASGVDAKAILSARLSKSRRLENLIAQLPGEKKNGLFGNLIALSLGLTPNFKSNFDLAEDAKLQLSKDTYDDDLDNLLAQIGDQYADLFLAAKNLSDAILLSDILRVNTEITKAPLSASMIKRYDEHHQDLTLLKALVRQQLPEKYKEIFFDQSKNGYAGYIDGGASQEEFYKFIKPILEKMDGTEELLVKLNREDLLRKQRTFDNGSIPHQIHLGELHAILRRQEDFYPFLKDNREKIEKILTFRIPYYVGPLARGNSRFAWMTRKSEETITPWNFEEVVDKGASAQSFIERMTNFDKNLPNEKVLPKHSLLYEYFTVYNELTKVKYVTEGMRKPAFLSGEQKKAIVDLLFKTNRKVTVKQLKEDYFKKIECFDSVEISGVEDRFNASLGTYHDLLKIIKDKDFLDNEENEDILEDIVLTLTLFEDREMIEERLKTYAHLFDDKVMKQLKRRRYTGWGRLSRKLINGIRDKQSGKTILDFLKSDGFANRNFMQLIHDDSLTFKEDIQKAQVSGQGDSLHEHIANLAGSPAIKKGILQTVKVVDELVKVMGRHKPENIVIEMARENQTTQKGQKNSRERMKRIEEGIKELGSQILKEHPVENTQLQNEKLYLYYLQNGRDMYVDQELDINRLSDYDVDHIVPQSFLKDDSIDNKVLTRSDKARGKSDNVPSEEVVKKMKNYWRQLLNAKLITQRKFDNLTKAERGGLSELDKAGFIKRQLVETRQITKHVAQILDSRMNTKYDENDKLIREVKVITLKSKLVSDFRKDFQFYKVREINNYHHAHDAYLNAVVGTALIKKYPKLESEFVYGDYKVYDVRKMIAKSEQEIGKATAKYFFYSNIMNFFKTEITLANGEIRKRPLIETNGETGEIVWDKGRDFATVRKVLSMPQVNIVKKTEVQTGGFSKESILPKRNSDKLIARKKDWDPKKYGGFDSPTVAYSVLVVAKVEKGKSKKLKSVKELLGITIMERSSFEKNPIDFLEAKGYKEVKKDLIIKLPKYSLFELENGRKRMLASAGELQKGNELALPSKYVNFLYLASHYEKLKGSPEDNEQKQLFVEQHKHYLDEIIEQISEFSKRVILADANLDKVLSAYNKHRDKPIREQAENIIHLFTLTNLGAPAAFKYFDTTIDRKRYTSTKEVLDATLIHQSITGLYETRIDLSQLGGDGGEAAAKGSSGGSGGVLNLEEEYRLHEKPVPSSIDPSWLQLFPTVWAERAGMGLANQVPPVVVELRSGASPVAVRQYPMSKEAREGIRPHIQKFLDLGVLVPCRSPWNTPLLPVKKPGTNDYRPVQDLREINKRVQDIHPTVPNPYNLLSSLPPSYTWYSVLDLKDAFFCLRLHPNSQPLFAFEWKDPEKGNTGQLTWTRLPQGFKNSPTLFNEALHRDLAPFRALNPQVVLLQYVDDLLVAAPTYEDCKKGTQKLLQELSKLGYRVSAKKAQLCQREVTYLGYLLKEGKRWLTPARKATVMKIPVPTTPRQVREFLGTAGFCRLWIPGFASLAAPLYPLTKPSIPFIWTEEHQQAFDHIKKALLSAPALALPDLTKPFTLYIDERAGVARGVLTQTLGPWRRPVAYLSKKLDPVASGWPTCLKAVAAVALLLKDADKLTLGQNVTVIASHSLESIVRQPPDRWMTNARMTHYQSLLLNERVSFAPPAVLNPATLLPVESEATPVHRCSEILAEETGTRRDLEDQPLPGVPTWYTDGSSFITEGKRRAGAPIVDGKRTVWASSLPEGTSAQKAELVALTQALRLAEGKNINIYTDSRYAFATAHIHGAIYKQRGWLTSAGKDIKNKEEILALLEAIHLPRRVAIIHCPGHQRGSNPVATGNRRADEAAKQAALSTRVLAGTTKPAGKRTADGSEFEKRTADGSEFESPKKKAKVE

SEQ ID NO: 7110 - protein, 2127 aa, synthetic construct
MPAAKRVKLDGGDKKYSIGLDIGTNSVGWAVITDEYKVPSKKFKVLGNTDRHSIKKNLIGALLFDSGETAEATRLKRTARRRYTRRKNRICYLQEIFSNEMAKVDDSFFHRLEESFLVEEDKKHERHPIFGNIVDEVAYHEKYPTIYHLRKKLVDSTDKADLRLIYLALAHMIKFRGHFLIEGDLNPDNSDVDKLFIQLVQTYNQLFEENPINASGVDAKAILSARLSKSRRLENLIAQLPGEKKNGLFGNLIALSLGLTPNFKSNFDLAEDAKLQLSKDTYDDDLDNLLAQIGDQYADLFLAAKNLSDAILLSDILRVNTEITKAPLSASMIKRYDEHHQDLTLLKALVRQQLPEKYKEIFFDQSKNGYAGYIDGGASQEEFYKFIKPILEKMDGTEELLVKLNREDLLRKQRTFDNGSIPHQIHLGELHAILRRQEDFYPFLKDNREKIEKILTFRIPYYVGPLARGNSRFAWMTRKSEETITPWNFEEVVDKGASAQSFIERMTNFDKNLPNEKVLPKHSLLYEYFTVYNELTKVKYVTEGMRKPAFLSGEQKKAIVDLLFKTNRKVTVKQLKEDYFKKIECFDSVEISGVEDRFNASLGTYHDLLKIIKDKDFLDNEENEDILEDIVLTLTLFEDREMIEERLKTYAHLFDDKVMKQLKRRRYTGWGRLSRKLINGIRDKQSGKTILDFLKSDGFANRNFMQLIHDDSLTFKEDIQKAQVSGQGDSLHEHIANLAGSPAIKKGILQTVKVVDELVKVMGRHKPENIVIEMARENQTTQKGQKNSRERMKRIEEGIKELGSQILKEHPVENTQLQNEKLYLYYLQNGRDMYVDQELDINRLSDYDVDHIVPQSFLKDDSIDNKVLTRSDKARGKSDNVPSEEVVKKMKNYWRQLLNAKLITQRKFDNLTKAERGGLSELDKAGFIKRQLVETRQITKHVAQILDSRMNTKYDENDKLIREVKVITLKSKLVSDFRKDFQFYKVREINNYHHAHDAYLNAVVGTALIKKYPKLESEFVYGDYKVYDVRKMIAKSEQEIGKATAKYFFYSNIMNFFKTEITLANGEIRKRPLIETNGETGEIVWDKGRDFATVRKVLSMPQVNIVKKTEVQTGGFSKESILPKRNSDKLIARKKDWDPKKYGGFDSPTVAYSVLVVAKVEKGKSKKLKSVKELLGITIMERSSFEKNPIDFLEAKGYKEVKKDLIIKLPKYSLFELENGRKRMLASAGELQKGNELALPSKYVNFLYLASHYEKLKGSPEDNEQKQLFVEQHKHYLDEIIEQISEFSKRVILADANLDKVLSAYNKHRDKPIREQAENIIHLFTLTNLGAPAAFKYFDTTIDRKRYTSTKEVLDATLIHQSITGLYETRIDLSQLGGDGGEAAAKGSSGGSGGLLGRDLLTKLKAQIQFSTEGPQVTWEDRPAMCLVLNLEEEYRLHEKPVPPSIDPSWLQLFPMVWAEKAGMGLANQVPPVVVELKSDASPVAVRQYPMSKEAREGIRPHIQRFLDLGILVPCQSPWNTPLLPVKKPGTNDYRPVQDLREVNKRVQDIHPTVPNPYNLLSSLPPSHTWYSVLDLKDAFFCLKLHPNSQPLFAFEWRDPEKGNTGQLTWTRLPQGFKNSPTLFNEALHRDLASFRALNPQVVMLQYVDDLLVAAPTYRDCKEGTRRLLQELSKLGYRVSAKKAQLCREEVTYLGYLLKGGKRWLTPARKATVMKIPTPTTPRQVREFLGTAGFCRLWIPGFASLAAPLYPLTRPKVPFTWTEAHQEAFGRIKEALLSAPALALPDLTKPFALYVDEKEGVARGVLTQTLGPWRRPVAYLSKKLDPVASGWPTCLKAIAAVALLLKDADKLTLGQNVLVIAPHNLESIVRQPPDRWMTNARMTHYQSLLLNERVSFAPPAILNPATLLPVESDDTPIHICSEILAEETGTRPDLRDQPLPGVPAWYTDGSSFIMDGRRQAGAAIVDNKRTVWASNLPEGTSAQKAELIALTQALRLAEGKSINIYTDSRYAFATAHVHGAIYKQRGWLTSAGKDIKNKEEILALLEAIHLPKRVAIIHCPGHQRGTDPVATGNRKADEAAKQAAQSTRILTETTKNAGKRTADGSEFEKRTADGSEFESPKKKAKVE

SEQ ID NO: 7111 - protein, 2218 aa, synthetic construct
MPAAKRVKLDGGDKKYSIGLDIGTNSVGWAVITDEYKVPSKKFKVLGNTDRHSIKKNLIGALLFDSGETAEATRLKRTARRRYTRRKNRICYLQEIFSNEMAKVDDSFFHRLEESFLVEEDKKHERHPIFGNIVDEVAYHEKYPTIYHLRKKLVDSTDKADLRLIYLALAHMIKFRGHFLIEGDLNPDNSDVDKLFIQLVQTYNQLFEENPINASGVDAKAILSARLSKSRRLENLIAQLPGEKKNGLFGNLIALSLGLTPNFKSNFDLAEDAKLQLSKDTYDDDLDNLLAQIGDQYADLFLAAKNLSDAILLSDILRVNTEITKAPLSASMIKRYDEHHQDLTLLKALVRQQLPEKYKEIFFDQSKNGYAGYIDGGASQEEFYKFIKPILEKMDGTEELLVKLNREDLLRKQRTFDNGSIPHQIHLGELHAILRRQEDFYPFLKDNREKIEKILTFRIPYYVGPLARGNSRFAWMTRKSEETITPWNFEEVVDKGASAQSFIERMTNFDKNLPNEKVLPKHSLLYEYFTVYNELTKVKYVTEGMRKPAFLSGEQKKAIVDLLFKTNRKVTVKQLKEDYFKKIECFDSVEISGVEDRFNASLGTYHDLLKIIKDKDFLDNEENEDILEDIVLTLTLFEDREMIEERLKTYAHLFDDKVMKQLKRRRYTGWGRLSRKLINGIRDKQSGKTILDFLKSDGFANRNFMQLIHDDSLTFKEDIQKAQVSGQGDSLHEHIANLAGSPAIKKGILQTVKVVDELVKVMGRHKPENIVIEMARENQTTQKGQKNSRERMKRIEEGIKELGSQILKEHPVENTQLQNEKLYLYYLQNGRDMYVDQELDINRLSDYDVDHIVPQSFLKDDSIDNKVLTRSDKARGKSDNVPSEEVVKKMKNYWRQLLNAKLITQRKFDNLTKAERGGLSELDKAGFIKRQLVETRQITKHVAQILDSRMNTKYDENDKLIREVKVITLKSKLVSDFRKDFQFYKVREINNYHHAHDAYLNAVVGTALIKKYPKLESEFVYGDYKVYDVRKMIAKSEQEIGKATAKYFFYSNIMNFFKTEITLANGEIRKRPLIETNGETGEIVWDKGRDFATVRKVLSMPQVNIVKKTEVQTGGFSKESILPKRNSDKLIARKKDWDPKKYGGFDSPTVAYSVLVVAKVEKGKSKKLKSVKELLGITIMERSSFEKNPIDFLEAKGYKEVKKDLIIKLPKYSLFELENGRKRMLASAGELQKGNELALPSKYVNFLYLASHYEKLKGSPEDNEQKQLFVEQHKHYLDEIIEQISEFSKRVILADANLDKVLSAYNKHRDKPIREQAENIIHLFTLTNLGAPAAFKYFDTTIDRKRYTSTKEVLDATLIHQSITGLYETRIDLSQLGGDGGEAAAKGSSGGSGGTLGDQGSRGSDPLPEPRVTLTVEGIPTEFLVNTGAEHSVLTKPMGKMGSKRTVVAGATGSKVYPWTTKRLLKIGQKQVTHSFLVIPECPAPLLGRDLLTKLKAQIQFSTEGPQVTWEDRPAMCLVLNLEEEYRLHEKPVPPSIDPSWLQLFPMVWAEKAGMGLANQVPPVVVELKSDASPVAVRQYPMSKEAREGIRPHIQRFLDLGILVPCQSPWNTPLLPVKKPGTNDYRPVQDLREVNKRVQDIHPTVPNPYNLLSSLPPSHTWYSVLDLKDAFFCLKLHPNSQPLFAFEWRDPEKGNTGQLTWTRLPQGFKNSPTLFNEALHRDLASFRALNPQVVMLQYVDDLLVAAPTYRDCKEGTRRLLQELSKLGYRVSAKKAQLCREEVTYLGYLLKGGKRWLTPARKATVMKIPTPTTPRQVREFLGTAGFCRLWIPGFASLAAPLYPLTRPKVPFTWTEAHQEAFGRIKEALLSAPALALPDLTKPFALYVDEKEGVARGVLTQTLGPWRRPVAYLSKKLDPVASGWPTCLKAIAAVALLLKDADKLTLGQNVLVIAPHNLESIVRQPPDRWMTNARMTHYQSLLLNERVSFAPPAILNPATLLPVESDDTPIHICSEILAEETGTRPDLRDQPLPGVPAWYTDGSSFIMDGRRQAGAAIVDNKRTVWASNLPEGTSAQKAELIALTQALRLAEGKSINIYTDSRYAFATAHVHGAIYKQRGWLTSAGKDIKNKEEILALLEAIHLPKRVAIIHCPGHQRGTDPVATGNRKADEAAKQAAQSTRILTETTKNAGKRTADGSEFEKRTADGSEFESPKKKAKVE

SEQ ID NO: 7112 - protein, 2218 aa, synthetic construct
MPAAKRVKLDGGDKKYSIGLDIGTNSVGWAVITDEYKVPSKKFKVLGNTDRHSIKKNLIGALLFDSGETAEATRLKRTARRRYTRRKNRICYLQEIFSNEMAKVDDSFFHRLEESFLVEEDKKHERHPIFGNIVDEVAYHEKYPTIYHLRKKLVDSTDKADLRLIYLALAHMIKFRGHFLIEGDLNPDNSDVDKLFIQLVQTYNQLFEENPINASGVDAKAILSARLSKSRRLENLIAQLPGEKKNGLFGNLIALSLGLTPNFKSNFDLAEDAKLQLSKDTYDDDLDNLLAQIGDQYADLFLAAKNLSDAILLSDILRVNTEITKAPLSASMIKRYDEHHQDLTLLKALVRQQLPEKYKEIFFDQSKNGYAGYIDGGASQEEFYKFIKPILEKMDGTEELLVKLNREDLLRKQRTFDNGSIPHQIHLGELHAILRRQEDFYPFLKDNREKIEKILTFRIPYYVGPLARGNSRFAWMTRKSEETITPWNFEEVVDKGASAQSFIERMTNFDKNLPNEKVLPKHSLLYEYFTVYNELTKVKYVTEGMRKPAFLSGEQKKAIVDLLFKTNRKVTVKQLKEDYFKKIECFDSVEISGVEDRFNASLGTYHDLLKIIKDKDFLDNEENEDILEDIVLTLTLFEDREMIEERLKTYAHLFDDKVMKQLKRRRYTGWGRLSRKLINGIRDKQSGKTILDFLKSDGFANRNFMQLIHDDSLTFKEDIQKAQVSGQGDSLHEHIANLAGSPAIKKGILQTVKVVDELVKVMGRHKPENIVIEMARENQTTQKGQKNSRERMKRIEEGIKELGSQILKEHPVENTQLQNEKLYLYYLQNGRDMYVDQELDINRLSDYDVDHIVPQSFLKDDSIDNKVLTRSDKARGKSDNVPSEEVVKKMKNYWRQLLNAKLITQRKFDNLTKAERGGLSELDKAGFIKRQLVETRQITKHVAQILDSRMNTKYDENDKLIREVKVITLKSKLVSDFRKDFQFYKVREINNYHHAHDAYLNAVVGTALIKKYPKLESEFVYGDYKVYDVRKMIAKSEQEIGKATAKYFFYSNIMNFFKTEITLANGEIRKRPLIETNGETGEIVWDKGRDFATVRKVLSMPQVNIVKKTEVQTGGFSKESILPKRNSDKLIARKKDWDPKKYGGFDSPTVAYSVLVVAKVEKGKSKKLKSVKELLGITIMERSSFEKNPIDFLEAKGYKEVKKDLIIKLPKYSLFELENGRKRMLASAGELQKGNELALPSKYVNFLYLASHYEKLKGSPEDNEQKQLFVEQHKHYLDEIIEQISEFSKRVILADANLDKVLSAYNKHRDKPIREQAENIIHLFTLTNLGAPAAFKYFDTTIDRKRYTSTKEVLDATLIHQSITGLYETRIDLSQLGGDGGEAAAKGSSGGSGGTLGDQGSRGSDPLPEPRVTLTVEGIPTEFLVNTGAEHSVLTKPMGKMGSKRTVVAGATGSKVYPWTTKRLLKIGQKQVTHSFLVIPECPAPLLGRDLLTKLKAQIQFSTEGPQVTWEDRPAMCLVLNLEEEYRLHEKPVPPSIDPSWLQLFPMVWAEKAGMGLANQVPPVVVELKSDASPVAVRQYPMSKEAREGIRPHIQRFLDLGILVPCQSPWNTPLLPVKKPGTNDYRPVQDLREVNKRVQDIHPTVPNPYNLLSSLPPSHTWYSVLDLKDAFFCLKLHPNSQPLFAFEWRDPEKGNTGQLTWTRLPQGFKNSPTLFNEALHRDLASFRALNPQVVMLQYVDDLLVAAPTYRDCKEGTRRLLQELSKLGYRVSAKKAQLCREEVTYLGYLLKGGKRWLTPARKATVMKIPTPTTPRQVREFLGKAGFCRLFIPGFASLAAPLYPLTRPKVPFTWTEAHQEAFGRIKEALLSAPALALPDLTKPFALYVDEKEGVARGVLTQTLGPWRRPVAYLSKKLDPVASGWPTCLKAIAAVALLLKDADKLTLGQNVLVIAPHNLESIVRQPPDRWMTNARMTHYQSLLLNERVSFAPPAILNPATLLPVESDDTPIHICSEILAEETGTRPDLRDQPLPGVPAWYTDGSSFIMDGRRQAGAAIVDNKRTVWASNLPEGTSAQKAELIALTQALRLAEGKSINIYTDSRYAFATAHVHGAIYKQRGWLTSAGKDIKNKEEILALLEAIHLPKRVAIIHCPGHQRGTDPVATGNRKADEAAKQAAQSTRILTETTKNAGKRTADGSEFEKRTADGSEFESPKKKAKVE

SEQ ID NO: 7113 - protein, 2096 aa, synthetic construct
MPAAKRVKLDGGDKKYSIGLDIGTNSVGWAVITDEYKVPSKKFKVLGNTDRHSIKKNLIGALLFDSGETAEATRLKRTARRRYTRRKNRICYLQEIFSNEMAKVDDSFFHRLEESFLVEEDKKHERHPIFGNIVDEVAYHEKYPTIYHLRKKLVDSTDKADLRLIYLALAHMIKFRGHFLIEGDLNPDNSDVDKLFIQLVQTYNQLFEENPINASGVDAKAILSARLSKSRRLENLIAQLPGEKKNGLFGNLIALSLGLTPNFKSNFDLAEDAKLQLSKDTYDDDLDNLLAQIGDQYADLFLAAKNLSDAILLSDILRVNTEITKAPLSASMIKRYDEHHQDLTLLKALVRQQLPEKYKEIFFDQSKNGYAGYIDGGASQEEFYKFIKPILEKMDGTEELLVKLNREDLLRKQRTFDNGSIPHQIHLGELHAILRRQEDFYPFLKDNREKIEKILTFRIPYYVGPLARGNSRFAWMTRKSEETITPWNFEEVVDKGASAQSFIERMTNFDKNLPNEKVLPKHSLLYEYFTVYNELTKVKYVTEGMRKPAFLSGEQKKAIVDLLFKTNRKVTVKQLKEDYFKKIECFDSVEISGVEDRFNASLGTYHDLLKIIKDKDFLDNEENEDILEDIVLTLTLFEDREMIEERLKTYAHLFDDKVMKQLKRRRYTGWGRLSRKLINGIRDKQSGKTILDFLKSDGFANRNFMQLIHDDSLTFKEDIQKAQVSGQGDSLHEHIANLAGSPAIKKGILQTVKVVDELVKVMGRHKPENIVIEMARENQTTQKGQKNSRERMKRIEEGIKELGSQILKEHPVENTQLQNEKLYLYYLQNGRDMYVDQELDINRLSDYDVDHIVPQSFLKDDSIDNKVLTRSDKARGKSDNVPSEEVVKKMKNYWRQLLNAKLITQRKFDNLTKAERGGLSELDKAGFIKRQLVETRQITKHVAQILDSRMNTKYDENDKLIREVKVITLKSKLVSDFRKDFQFYKVREINNYHHAHDAYLNAVVGTALIKKYPKLESEFVYGDYKVYDVRKMIAKSEQEIGKATAKYFFYSNIMNFFKTEITLANGEIRKRPLIETNGETGEIVWDKGRDFATVRKVLSMPQVNIVKKTEVQTGGFSKESILPKRNSDKLIARKKDWDPKKYGGFDSPTVAYSVLVVAKVEKGKSKKLKSVKELLGITIMERSSFEKNPIDFLEAKGYKEVKKDLIIKLPKYSLFELENGRKRMLASAGELQKGNELALPSKYVNFLYLASHYEKLKGSPEDNEQKQLFVEQHKHYLDEIIEQISEFSKRVILADANLDKVLSAYNKHRDKPIREQAENIIHLFTLTNLGAPAAFKYFDTTIDRKRYTSTKEVLDATLIHQSITGLYETRIDLSQLGGDGGEAAAKGSSGGSGGTLNLEDEYRLYETSAEPEVSPGSTWLSDFPQAWAETGGMGLAVRQAPLIIPLKATSTPVSIKQYPMSQEAKLGIKPHIQRLLDQGILVPCQSPWNTPLLPVKKPGTNDYRPVQDLREVNKRVEDIHPTVPNPYNLLSGLPPSHRWYTVLDLKDAFFCLRLHPTSQPLFAFEWRDPGMGISGQLTWTRLPQGFKNSPTLFNEALHRDLADFRIQHPDLILLQYVDDILLAATSELDCQQGTRALLLTLGNLGYRASAKKAQLCQKQVKYLGYLLKEGQRWLTEARKETVMGQPTPKTPRQLREFLGTAGFCRLWIPGFAEMAAPLYPLTKPGTLFNWGPDQQKAYQEIKQALLTAPALGLPDLTKPFELFVDEKQGYAKGVLTQKLGPWRRPVAYLSKKLDPVAAGWPPCLRMVAAIAVLRKDAGKLTMGQPLVILAPHAVEALVKQPPDRWLSNARMTHYQAMLLDTDRVQFGPVVALNPATLLPLPEEGAPHDCLEILAETHGTRPDLTDQPIPDADHTWYTDGSSFLQEGQRKAGAAVTTETEVIWARALPAGTSAQRAELIALTQALKMAEGKRLNVYTDSRYAFATAHIHGEIYRRRGWLTSEGREIKNKSEILALLKALFLPKRLSIIHCLGHQKGDSAEARGNRLADQAAREAAIKTPPDTSTLLAGKRTADGSEFEKRTADGSEFESPKKKAKVE

SEQ ID NO: 7114 - protein, 2096 aa, synthetic construct
MPAAKRVKLDGGDKKYSIGLDIGTNSVGWAVITDEYKVPSKKFKVLGNTDRHSIKKNLIGALLFDSGETAEATRLKRTARRRYTRRKNRICYLQEIFSNEMAKVDDSFFHRLEESFLVEEDKKHERHPIFGNIVDEVAYHEKYPTIYHLRKKLVDSTDKADLRLIYLALAHMIKFRGHFLIEGDLNPDNSDVDKLFIQLVQTYNQLFEENPINASGVDAKAILSARLSKSRRLENLIAQLPGEKKNGLFGNLIALSLGLTPNFKSNFDLAEDAKLQLSKDTYDDDLDNLLAQIGDQYADLFLAAKNLSDAILLSDILRVNTEITKAPLSASMIKRYDEHHQDLTLLKALVRQQLPEKYKEIFFDQSKNGYAGYIDGGASQEEFYKFIKPILEKMDGTEELLVKLNREDLLRKQRTFDNGSIPHQIHLGELHAILRRQEDFYPFLKDNREKIEKILTFRIPYYVGPLARGNSRFAWMTRKSEETITPWNFEEVVDKGASAQSFIERMTNFDKNLPNEKVLPKHSLLYEYFTVYNELTKVKYVTEGMRKPAFLSGEQKKAIVDLLFKTNRKVTVKQLKEDYFKKIECFDSVEISGVEDRFNASLGTYHDLLKIIKDKDFLDNEENEDILEDIVLTLTLFEDREMIEERLKTYAHLFDDKVMKQLKRRRYTGWGRLSRKLINGIRDKQSGKTILDFLKSDGFANRNFMQLIHDDSLTFKEDIQKAQVSGQGDSLHEHIANLAGSPAIKKGILQTVKVVDELVKVMGRHKPENIVIEMARENQTTQKGQKNSRERMKRIEEGIKELGSQILKEHPVENTQLQNEKLYLYYLQNGRDMYVDQELDINRLSDYDVDHIVPQSFLKDDSIDNKVLTRSDKARGKSDNVPSEEVVKKMKNYWRQLLNAKLITQRKFDNLTKAERGGLSELDKAGFIKRQLVETRQITKHVAQILDSRMNTKYDENDKLIREVKVITLKSKLVSDFRKDFQFYKVREINNYHHAHDAYLNAVVGTALIKKYPKLESEFVYGDYKVYDVRKMIAKSEQEIGKATAKYFFYSNIMNFFKTEITLANGEIRKRPLIETNGETGEIVWDKGRDFATVRKVLSMPQVNIVKKTEVQTGGFSKESILPKRNSDKLIARKKDWDPKKYGGFDSPTVAYSVLVVAKVEKGKSKKLKSVKELLGITIMERSSFEKNPIDFLEAKGYKEVKKDLIIKLPKYSLFELENGRKRMLASAGELQKGNELALPSKYVNFLYLASHYEKLKGSPEDNEQKQLFVEQHKHYLDEIIEQISEFSKRVILADANLDKVLSAYNKHRDKPIREQAENIIHLFTLTNLGAPAAFKYFDTTIDRKRYTSTKEVLDATLIHQSITGLYETRIDLSQLGGDGGEAAAKGSSGGSGGTLNIEDEYRLHETSKGPDVPLGSTWLSDFPQAWAETGGMGLAVRQAPLIIPLKATSTPVSIKQYPMSQEARLGIKPHIQRLLDQGILVPCQSPWNTPLLPVKKPGTNDYRPVQDLREVNKRVEDIHPTVPNPYNLLSGLPPSHQWYTVLDLKDAFFCLRLHPTSQSLFAFEWRDPEMGISGQLTWTRLPQGFKNSPTLFDEALHRDLADFRIQHPDLILLQYVDDLLLAATSELDCQQGTRALLQTLGDLGYRASAKKAQICQKQVKYLGYLLKEGQRWLTEARKETVMGQPTPKTPRQLREFLGTAGFCRLWIPGFAEMAAPLYPLTKTGTLFEWGPDQQKAYQEIKQALLTAPALGLPDLTKPFELFVDEKQGYAKGVLTQKLGPWRRPVAYLSKKLDPVAAGWPPCLRMVAAIAVLTKDAGKLTMGQPLVILAPHAVEALVKQPPDRWLSNARMTHYQALLLDTDRVQFGPIVALNPATLLPLPEEGLQHDCLDILAEAHGTRPDLTDQPLPDADHTWYTDGSSFLQEGQRKAGAAVTTETEVVWAKALPAGTSAQRAELIALTQALKMAEGKKLNVYTDSRYAFATAHIHGEIYRRRGLLTSEGKEIKNKDEILALLKALFLPKRLSIIHCPGHQKGNRAEARGNRMADQAAREVATRETPETSTLLAGKRTADGSEFEKRTADGSEFESPKKKAKVE

SEQ ID NO: 7115 - protein, 2096 aa, synthetic construct
MPAAKRVKLDGGDKKYSIGLDIGTNSVGWAVITDEYKVPSKKFKVLGNTDRHSIKKNLIGALLFDSGETAEATRLKRTARRRYTRRKNRICYLQEIFSNEMAKVDDSFFHRLEESFLVEEDKKHERHPIFGNIVDEVAYHEKYPTIYHLRKKLVDSTDKADLRLIYLALAHMIKFRGHFLIEGDLNPDNSDVDKLFIQLVQTYNQLFEENPINASGVDAKAILSARLSKSRRLENLIAQLPGEKKNGLFGNLIALSLGLTPNFKSNFDLAEDAKLQLSKDTYDDDLDNLLAQIGDQYADLFLAAKNLSDAILLSDILRVNTEITKAPLSASMIKRYDEHHQDLTLLKALVRQQLPEKYKEIFFDQSKNGYAGYIDGGASQEEFYKFIKPILEKMDGTEELLVKLNREDLLRKQRTFDNGSIPHQIHLGELHAILRRQEDFYPFLKDNREKIEKILTFRIPYYVGPLARGNSRFAWMTRKSEETITPWNFEEVVDKGASAQSFIERMTNFDKNLPNEKVLPKHSLLYEYFTVYNELTKVKYVTEGMRKPAFLSGEQKKAIVDLLFKTNRKVTVKQLKEDYFKKIECFDSVEISGVEDRFNASLGTYHDLLKIIKDKDFLDNEENEDILEDIVLTLTLFEDREMIEERLKTYAHLFDDKVMKQLKRRRYTGWGRLSRKLINGIRDKQSGKTILDFLKSDGFANRNFMQLIHDDSLTFKEDIQKAQVSGQGDSLHEHIANLAGSPAIKKGILQTVKVVDELVKVMGRHKPENIVIEMARENQTTQKGQKNSRERMKRIEEGIKELGSQILKEHPVENTQLQNEKLYLYYLQNGRDMYVDQELDINRLSDYDVDHIVPQSFLKDDSIDNKVLTRSDKARGKSDNVPSEEVVKKMKNYWRQLLNAKLITQRKFDNLTKAERGGLSELDKAGFIKRQLVETRQITKHVAQILDSRMNTKYDENDKLIREVKVITLKSKLVSDFRKDFQFYKVREINNYHHAHDAYLNAVVGTALIKKYPKLESEFVYGDYKVYDVRKMIAKSEQEIGKATAKYFFYSNIMNFFKTEITLANGEIRKRPLIETNGETGEIVWDKGRDFATVRKVLSMPQVNIVKKTEVQTGGFSKESILPKRNSDKLIARKKDWDPKKYGGFDSPTVAYSVLVVAKVEKGKSKKLKSVKELLGITIMERSSFEKNPIDFLEAKGYKEVKKDLIIKLPKYSLFELENGRKRMLASAGELQKGNELALPSKYVNFLYLASHYEKLKGSPEDNEQKQLFVEQHKHYLDEIIEQISEFSKRVILADANLDKVLSAYNKHRDKPIREQAENIIHLFTLTNLGAPAAFKYFDTTIDRKRYTSTKEVLDATLIHQSITGLYETRIDLSQLGGDGGEAAAKGSSGGSGGTLNIEDEYRLHETSKGPDVPLGSTWLSDFPQAWAETGGMGLAVRQAPLIIPLKATSTPVSIKQYPMSQEARLGIKPHIQRLLDQGILVPCQSPWNTPLLPVKKPGTNDYRPVQDLREVNKRVEDIHPTVPNPYNLLSGLPPSHQWYTVLDLKDAFFCLRLHPTSQSLFAFEWRDPEMGISGQLTWTRLPQGFKNSPTLFNEALHRDLADFRIQHPDLILLQYVDDLLLAATSELDCQQGTRALLQTLGDLGYRASAKKAQICQKQVKYLGYLLKEGQRWLTEARKETVMGQPTPKTPRQLREFLGKAGFCRLFIPGFAEMAAPLYPLTKPGTLFEWGPDQQKAYQEIKQALLTAPALGLPDLTKPFELFVDEKQGYAKGVLTQKLGPWRRPVAYLSKKLDPVAAGWPPCLRMVAAIAVLTKDAGKLTMGQPLVILAPHAVEALVKQPPDRWLSNARMTHYQALLLDTDRVQFGPIVALNPATLLPLPEEGLQHDCLDILAEAHGTRPDLTDQPLPDADHTWYTDGSSFLQEGQRKAGAAVTTETEVVWAKALPAGTSAQRAELIALTQALKMAEGKKLNVYTDSRYAFATAHIHGEIYRRRGWLTSEGKEIKNKDEILALLKALFLPKRLSIIHCPGHQKGNRAEARGNRMADQAAREVATRETPETSTLLAGKRTADGSEFEKRTADGSEFESPKKKAKVE

SEQ ID NO: 7116 - protein, 2096 aa, synthetic construct
MPAAKRVKLDGGDKKYSIGLDIGTNSVGWAVITDEYKVPSKKFKVLGNTDRHSIKKNLIGALLFDSGETAEATRLKRTARRRYTRRKNRICYLQEIFSNEMAKVDDSFFHRLEESFLVEEDKKHERHPIFGNIVDEVAYHEKYPTIYHLRKKLVDSTDKADLRLIYLALAHMIKFRGHFLIEGDLNPDNSDVDKLFIQLVQTYNQLFEENPINASGVDAKAILSARLSKSRRLENLIAQLPGEKKNGLFGNLIALSLGLTPNFKSNFDLAEDAKLQLSKDTYDDDLDNLLAQIGDQYADLFLAAKNLSDAILLSDILRVNTEITKAPLSASMIKRYDEHHQDLTLLKALVRQQLPEKYKEIFFDQSKNGYAGYIDGGASQEEFYKFIKPILEKMDGTEELLVKLNREDLLRKQRTFDNGSIPHQIHLGELHAILRRQEDFYPFLKDNREKIEKILTFRIPYYVGPLARGNSRFAWMTRKSEETITPWNFEEVVDKGASAQSFIERMTNFDKNLPNEKVLPKHSLLYEYFTVYNELTKVKYVTEGMRKPAFLSGEQKKAIVDLLFKTNRKVTVKQLKEDYFKKIECFDSVEISGVEDRFNASLGTYHDLLKIIKDKDFLDNEENEDILEDIVLTLTLFEDREMIEERLKTYAHLFDDKVMKQLKRRRYTGWGRLSRKLINGIRDKQSGKTILDFLKSDGFANRNFMQLIHDDSLTFKEDIQKAQVSGQGDSLHEHIANLAGSPAIKKGILQTVKVVDELVKVMGRHKPENIVIEMARENQTTQKGQKNSRERMKRIEEGIKELGSQILKEHPVENTQLQNEKLYLYYLQNGRDMYVDQELDINRLSDYDVDHIVPQSFLKDDSIDNKVLTRSDKARGKSDNVPSEEVVKKMKNYWRQLLNAKLITQRKFDNLTKAERGGLSELDKAGFIKRQLVETRQITKHVAQILDSRMNTKYDENDKLIREVKVITLKSKLVSDFRKDFQFYKVREINNYHHAHDAYLNAVVGTALIKKYPKLESEFVYGDYKVYDVRKMIAKSEQEIGKATAKYFFYSNIMNFFKTEITLANGEIRKRPLIETNGETGEIVWDKGRDFATVRKVLSMPQVNIVKKTEVQTGGFSKESILPKRNSDKLIARKKDWDPKKYGGFDSPTVAYSVLVVAKVEKGKSKKLKSVKELLGITIMERSSFEKNPIDFLEAKGYKEVKKDLIIKLPKYSLFELENGRKRMLASAGELQKGNELALPSKYVNFLYLASHYEKLKGSPEDNEQKQLFVEQHKHYLDEIIEQISEFSKRVILADANLDKVLSAYNKHRDKPIREQAENIIHLFTLTNLGAPAAFKYFDTTIDRKRYTSTKEVLDATLIHQSITGLYETRIDLSQLGGDGGEAAAKGSSGGSGGTLNIEDEHRLHETSKEPDVSLGSTWLSDFPQAWAETGGMGLAVRQAPLIIPLKATSTPVSIKQYPMSQEARLGIKPHIQRLLDQGILVPCQSPWNTPLLPVKKPGTNDYRPVQDLREVNKRVEDIHPTVPNPYNLLSGLPPSHQWYTVLDLKDAFFCLRLHPTSQPLFAFEWRDPEMGISGQLTWTRLPQGFKNSPTLFDEALHRDLADFRIQHPDLILLQYVDDLLLAATSELDCQQGTRALLQTLGNLGYRASAKKAQICQKQVKYLGYLLKEGQRWLTEARKETVMGQPTPKTPRQLREFLGTAGFCRLWIPGFAEMAAPLYPLTKTGTLFNWGPDQQKAYQEIKQALLTAPALGLPDLTKPFELFVDEKQGYAKGVLTQKLGPWRRPVAYLSKKLDPVAAGWPPCLRMVAAIAVLTKDAGKLTMGQPLVILAPHAVEALVKQPPDRWLSNARMTHYQALLLDTDRVQFGPVVALNPATLLPLPEEGLQHNCLDILAEAHGTRPDLTDQPLPDADHTWYTDGSSLLQEGQRKAGAAVTTETEVIWAKALPAGTSAQRAELIALTQALKMAEGKKLNVYTDSRYAFATAHIHGEIYRRRGLLTSEGKEIKNKDEILALLKALFLPKRLSIIHCPGHQKGHSAEARGNRMADQAARKAAITETPDTSTLLAGKRTADGSEFEKRTADGSEFESPKKKAKVE

SEQ ID NO: 7117 - protein, 2090 aa, synthetic construct
MPAAKRVKLDGGDKKYSIGLDIGTNSVGWAVITDEYKVPSKKFKVLGNTDRHSIKKNLIGALLFDSGETAEATRLKRTARRRYTRRKNRICYLQEIFSNEMAKVDDSFFHRLEESFLVEEDKKHERHPIFGNIVDEVAYHEKYPTIYHLRKKLVDSTDKADLRLIYLALAHMIKFRGHFLIEGDLNPDNSDVDKLFIQLVQTYNQLFEENPINASGVDAKAILSARLSKSRRLENLIAQLPGEKKNGLFGNLIALSLGLTPNFKSNFDLAEDAKLQLSKDTYDDDLDNLLAQIGDQYADLFLAAKNLSDAILLSDILRVNTEITKAPLSASMIKRYDEHHQDLTLLKALVRQQLPEKYKEIFFDQSKNGYAGYIDGGASQEEFYKFIKPILEKMDGTEELLVKLNREDLLRKQRTFDNGSIPHQIHLGELHAILRRQEDFYPFLKDNREKIEKILTFRIPYYVGPLARGNSRFAWMTRKSEETITPWNFEEVVDKGASAQSFIERMTNFDKNLPNEKVLPKHSLLYEYFTVYNELTKVKYVTEGMRKPAFLSGEQKKAIVDLLFKTNRKVTVKQLKEDYFKKIECFDSVEISGVEDRFNASLGTYHDLLKIIKDKDFLDNEENEDILEDIVLTLTLFEDREMIEERLKTYAHLFDDKVMKQLKRRRYTGWGRLSRKLINGIRDKQSGKTILDFLKSDGFANRNFMQLIHDDSLTFKEDIQKAQVSGQGDSLHEHIANLAGSPAIKKGILQTVKVVDELVKVMGRHKPENIVIEMARENQTTQKGQKNSRERMKRIEEGIKELGSQILKEHPVENTQLQNEKLYLYYLQNGRDMYVDQELDINRLSDYDVDHIVPQSFLKDDSIDNKVLTRSDKARGKSDNVPSEEVVKKMKNYWRQLLNAKLITQRKFDNLTKAERGGLSELDKAGFIKRQLVETRQITKHVAQILDSRMNTKYDENDKLIREVKVITLKSKLVSDFRKDFQFYKVREINNYHHAHDAYLNAVVGTALIKKYPKLESEFVYGDYKVYDVRKMIAKSEQEIGKATAKYFFYSNIMNFFKTEITLANGEIRKRPLIETNGETGEIVWDKGRDFATVRKVLSMPQVNIVKKTEVQTGGFSKESILPKRNSDKLIARKKDWDPKKYGGFDSPTVAYSVLVVAKVEKGKSKKLKSVKELLGITIMERSSFEKNPIDFLEAKGYKEVKKDLIIKLPKYSLFELENGRKRMLASAGELQKGNELALPSKYVNFLYLASHYEKLKGSPEDNEQKQLFVEQHKHYLDEIIEQISEFSKRVILADANLDKVLSAYNKHRDKPIREQAENIIHLFTLTNLGAPAAFKYFDTTIDRKRYTSTKEVLDATLIHQSITGLYETRIDLSQLGGDGGEAAAKGSSGGSGGTLQLDDEYRLYSPLVKPDQNIQFWLEQFPQAWAETAGMGLAKQVPPQVIQLKASATPVSVRQYPLSKEAQEGIRPHVQRLIQQGILVPVQSPWNTPLLPVRKPGTNDYRPVQDLREVNKRVQDIHPTVPNPYNLLCALPPQRSWYTVLDLKDAFFCLRLHPTSQPLFAFEWRDPGTGRTGQLTWTRLPQGFKNSPTIFDEALHRDLANFRIQHPQVTLLQYVDDLLLAGATKQDCLEGTKALLLELSDLGYRASAKKAQICRREVTYLGYSLRDGQRWLTEARKKTVVQIPAPTTAKQVREFLGTAGFCRLWIPGFATLAAPLYPLTKEKGEFSWAPEHQKAFDAIKKALLSAPALALPDVTKPFTLYVDERKGVARGVLTQTLGPWRRPVAYLSKKLDPVASGWPVCLKAIAAVAILVKDADKLTLGQNITVIAPHALENIVRQPPDRWMTNARMTHYQSLLLTERVTFAPPAALNPATLLPEETDEPVTHDCHQLLIEETGVRKDLTDIPLTGEVLTWFTDGSSYVVEGKRMAGAAVVDGTRTIWASSLPEGTSAQKAELMALTQALRLAEGKSINIYTDSRYAFATAHVHGAIYKQRGLLTSAGREIKNKEEILSLLEALHLPKRLAIIHCPGHQKAKDPISRGNQMADRVAKQAAQGVNLLAGKRTADGSEFEKRTADGSEFESPKKKAKVE

SEQ ID NO: 7118 - protein, 2176 aa, synthetic construct
MPAAKRVKLDGGDKKYSIGLDIGTNSVGWAVITDEYKVPSKKFKVLGNTDRHSIKKNLIGALLFDSGETAEATRLKRTARRRYTRRKNRICYLQEIFSNEMAKVDDSFFHRLEESFLVEEDKKHERHPIFGNIVDEVAYHEKYPTIYHLRKKLVDSTDKADLRLIYLALAHMIKFRGHFLIEGDLNPDNSDVDKLFIQLVQTYNQLFEENPINASGVDAKAILSARLSKSRRLENLIAQLPGEKKNGLFGNLIALSLGLTPNFKSNFDLAEDAKLQLSKDTYDDDLDNLLAQIGDQYADLFLAAKNLSDAILLSDILRVNTEITKAPLSASMIKRYDEHHQDLTLLKALVRQQLPEKYKEIFFDQSKNGYAGYIDGGASQEEFYKFIKPILEKMDGTEELLVKLNREDLLRKQRTFDNGSIPHQIHLGELHAILRRQEDFYPFLKDNREKIEKILTFRIPYYVGPLARGNSRFAWMTRKSEETITPWNFEEVVDKGASAQSFIERMTNFDKNLPNEKVLPKHSLLYEYFTVYNELTKVKYVTEGMRKPAFLSGEQKKAIVDLLFKTNRKVTVKQLKEDYFKKIECFDSVEISGVEDRFNASLGTYHDLLKIIKDKDFLDNEENEDILEDIVLTLTLFEDREMIEERLKTYAHLFDDKVMKQLKRRRYTGWGRLSRKLINGIRDKQSGKTILDFLKSDGFANRNFMQLIHDDSLTFKEDIQKAQVSGQGDSLHEHIANLAGSPAIKKGILQTVKVVDELVKVMGRHKPENIVIEMARENQTTQKGQKNSRERMKRIEEGIKELGSQILKEHPVENTQLQNEKLYLYYLQNGRDMYVDQELDINRLSDYDVDHIVPQSFLKDDSIDNKVLTRSDKARGKSDNVPSEEVVKKMKNYWRQLLNAKLITQRKFDNLTKAERGGLSELDKAGFIKRQLVETRQITKHVAQILDSRMNTKYDENDKLIREVKVITLKSKLVSDFRKDFQFYKVREINNYHHAHDAYLNAVVGTALIKKYPKLESEFVYGDYKVYDVRKMIAKSEQEIGKATAKYFFYSNIMNFFKTEITLANGEIRKRPLIETNGETGEIVWDKGRDFATVRKVLSMPQVNIVKKTEVQTGGFSKESILPKRNSDKLIARKKDWDPKKYGGFDSPTVAYSVLVVAKVEKGKSKKLKSVKELLGITIMERSSFEKNPIDFLEAKGYKEVKKDLIIKLPKYSLFELENGRKRMLASAGELQKGNELALPSKYVNFLYLASHYEKLKGSPEDNEQKQLFVEQHKHYLDEIIEQISEFSKRVILADANLDKVLSAYNKHRDKPIREQAENIIHLFTLTNLGAPAAFKYFDTTIDRKRYTSTKEVLDATLIHQSITGLYETRIDLSQLGGDGGEAAAKGSSGGSGGMDPLQLLQPLEAEIKGTKLKAHWNSGATITCVPQAFLEEEVPIKNIWIKTIHGEKEQPVYYLTFKIQGRKVEAEVISSPYDYILVSPSDIPWLMKKPLQLTTLVPLQEYEERLLKQTMLTGSYKEKLQSLFLKYDALWQHWENQVGHRRIKPHHIATGTVNPRPQKQYPINPKAKASIQTVINDLLKQGVLIQQNSIMNTPVYPVPKPDGKWRMVLDYREVNKTIPLIAAQNQHSAGILSSIFRGKYKTTLDLSNGFWAHSITPESYWLTAFTWLGQQYCWTRLPQGFLNSPALFNADVVDLLKEVPNVQVYVDDIYISHDDPREHLEQLEKVFSLLLNAGYVVSLKKSEIAQHEVEFLGFNITKEGRGLTETFKQKLLNITPPRDLKQLQSILGLLNFARNFIPNFSELVKPLYNIIATAPGKYITWTTDNSQQLQNIISMLNSAENLEERNPEVRLIMKVNTSPSAGYIRFYNEFAKRPIMYLNYVYTKAEVKFTNTEKLLTTIHKGLIKALDLGMGQEILVYSPIVSMTKIQKTPLPERKALPIRWITWMSYLEDPRIQFHYDKTLPELQQVPTVTDDIIAKIKHPSEFSMVFYTDGSAIKHPNVNKSHNAGMGIAQVQFKPEFTVINTWSIPLGDHTAQLAEVAAVEFACKKALKIDGPVLIVTDSFYVAESVNKELPYWQSNGFFNNKKKPLKHVSKWKSIADCIQLKPDIIIIHEKGHQPTASTFHTEGNNLADKLATQGSYVVNAGKRTADGSEFEKRTADGSEFESPKKKAKVE

SEQ ID NO: 7119 - protein, 2094 aa, synthetic construct
MPAAKRVKLDGGDKKYSIGLDIGTNSVGWAVITDEYKVPSKKFKVLGNTDRHSIKKNLIGALLFDSGETAEATRLKRTARRRYTRRKNRICYLQEIFSNEMAKVDDSFFHRLEESFLVEEDKKHERHPIFGNIVDEVAYHEKYPTIYHLRKKLVDSTDKADLRLIYLALAHMIKFRGHFLIEGDLNPDNSDVDKLFIQLVQTYNQLFEENPINASGVDAKAILSARLSKSRRLENLIAQLPGEKKNGLFGNLIALSLGLTPNFKSNFDLAEDAKLQLSKDTYDDDLDNLLAQIGDQYADLFLAAKNLSDAILLSDILRVNTEITKAPLSASMIKRYDEHHQDLTLLKALVRQQLPEKYKEIFFDQSKNGYAGYIDGGASQEEFYKFIKPILEKMDGTEELLVKLNREDLLRKQRTFDNGSIPHQIHLGELHAILRRQEDFYPFLKDNREKIEKILTFRIPYYVGPLARGNSRFAWMTRKSEETITPWNFEEVVDKGASAQSFIERMTNFDKNLPNEKVLPKHSLLYEYFTVYNELTKVKYVTEGMRKPAFLSGEQKKAIVDLLFKTNRKVTVKQLKEDYFKKIECFDSVEISGVEDRFNASLGTYHDLLKIIKDKDFLDNEENEDILEDIVLTLTLFEDREMIEERLKTYAHLFDDKVMKQLKRRRYTGWGRLSRKLINGIRDKQSGKTILDFLKSDGFANRNFMQLIHDDSLTFKEDIQKAQVSGQGDSLHEHIANLAGSPAIKKGILQTVKVVDELVKVMGRHKPENIVIEMARENQTTQKGQKNSRERMKRIEEGIKELGSQILKEHPVENTQLQNEKLYLYYLQNGRDMYVDQELDINRLSDYDVDHIVPQSFLKDDSIDNKVLTRSDKARGKSDNVPSEEVVKKMKNYWRQLLNAKLITQRKFDNLTKAERGGLSELDKAGFIKRQLVETRQITKHVAQILDSRMNTKYDENDKLIREVKVITLKSKLVSDFRKDFQFYKVREINNYHHAHDAYLNAVVGTALIKKYPKLESEFVYGDYKVYDVRKMIAKSEQEIGKATAKYFFYSNIMNFFKTEITLANGEIRKRPLIETNGETGEIVWDKGRDFATVRKVLSMPQVNIVKKTEVQTGGFSKESILPKRNSDKLIARKKDWDPKKYGGFDSPTVAYSVLVVAKVEKGKSKKLKSVKELLGITIMERSSFEKNPIDFLEAKGYKEVKKDLIIKLPKYSLFELENGRKRMLASAGELQKGNELALPSKYVNFLYLASHYEKLKGSPEDNEQKQLFVEQHKHYLDEIIEQISEFSKRVILADANLDKVLSAYNKHRDKPIREQAENIIHLFTLTNLGAPAAFKYFDTTIDRKRYTSTKEVLDATLIHQSITGLYETRIDLSQLGGDGGEAAAKGSSGGSGGVLNLEEEYRLHEKPVPSSIDPSWLQLFPTVWAERAGMGLANQVPPVVVELRSGASPVAVRQYPMSKEAREGIRPHIQRFLDLGVLVPCQSPWNTPLLPVKKPGTNDYRPVQDLREINKRVQDIHPTVPNPYNLLSSLPPSHTWYSVLDLKDAFFCLKLHPNSQPLFAFEWRDPEKGNTGQLTWTRLPQGFKNSPTLFDEALHRDLAPFRALNPQVVLLQYVDDLLVAAPTYRDCKEGTQKLLQELSKLGYRVSAKKAQLCQKEVTYLGYLLKEGKRWLTPARKATVMKIPPPTTPRQVREFLGTAGFCRLWIPGFASLAAPLYPLTKESIPFIWTEEHQKAFDRIKEALLSAPALALPDLTKPFTLYVDERAGVARGVLTQTLGPWRRPVAYLSKKLDPVASGWPTCLKAVAAVALLLKDADKLTLGQNVTVIASHSLESIVRQPPDRWMTNARMTHYQSLLLNERVSFAPPAVLNPATLLPVESEATPVHRCSEILAEETGTRRDLKDQPLPGVPAWYTDGSSFIAEGKRRAGAAIVDGKRTVWASSLPEGTSAQKAELVALTQALRLAEGKDINIYTDSRYAFATAHIHGAIYKQRGLLTSAGKDIKNKEEILALLEAIHLPKRVAIIHCPGHQKGNDPVATGNRRADEAAKQAALSTRVLAETTKPAGKRTADGSEFEKRTADGSEFESPKKKAKVE

SEQ ID NO: 7120 - protein, 2094 aa, synthetic construct
MPAAKRVKLDGGDKKYSIGLDIGTNSVGWAVITDEYKVPSKKFKVLGNTDRHSIKKNLIGALLFDSGETAEATRLKRTARRRYTRRKNRICYLQEIFSNEMAKVDDSFFHRLEESFLVEEDKKHERHPIFGNIVDEVAYHEKYPTIYHLRKKLVDSTDKADLRLIYLALAHMIKFRGHFLIEGDLNPDNSDVDKLFIQLVQTYNQLFEENPINASGVDAKAILSARLSKSRRLENLIAQLPGEKKNGLFGNLIALSLGLTPNFKSNFDLAEDAKLQLSKDTYDDDLDNLLAQIGDQYADLFLAAKNLSDAILLSDILRVNTEITKAPLSASMIKRYDEHHQDLTLLKALVRQQLPEKYKEIFFDQSKNGYAGYIDGGASQEEFYKFIKPILEKMDGTEELLVKLNREDLLRKQRTFDNGSIPHQIHLGELHAILRRQEDFYPFLKDNREKIEKILTFRIPYYVGPLARGNSRFAWMTRKSEETITPWNFEEVVDKGASAQSFIERMTNFDKNLPNEKVLPKHSLLYEYFTVYNELTKVKYVTEGMRKPAFLSGEQKKAIVDLLFKTNRKVTVKQLKEDYFKKIECFDSVEISGVEDRFNASLGTYHDLLKIIKDKDFLDNEENEDILEDIVLTLTLFEDREMIEERLKTYAHLFDDKVMKQLKRRRYTGWGRLSRKLINGIRDKQSGKTILDFLKSDGFANRNFMQLIHDDSLTFKEDIQKAQVSGQGDSLHEHIANLAGSPAIKKGILQTVKVVDELVKVMGRHKPENIVIEMARENQTTQKGQKNSRERMKRIEEGIKELGSQILKEHPVENTQLQNEKLYLYYLQNGRDMYVDQELDINRLSDYDVDHIVPQSFLKDDSIDNKVLTRSDKARGKSDNVPSEEVVKKMKNYWRQLLNAKLITQRKFDNLTKAERGGLSELDKAGFIKRQLVETRQITKHVAQILDSRMNTKYDENDKLIREVKVITLKSKLVSDFRKDFQFYKVREINNYHHAHDAYLNAVVGTALIKKYPKLESEFVYGDYKVYDVRKMIAKSEQEIGKATAKYFFYSNIMNFFKTEITLANGEIRKRPLIETNGETGEIVWDKGRDFATVRKVLSMPQVNIVKKTEVQTGGFSKESILPKRNSDKLIARKKDWDPKKYGGFDSPTVAYSVLVVAKVEKGKSKKLKSVKELLGITIMERSSFEKNPIDFLEAKGYKEVKKDLIIKLPKYSLFELENGRKRMLASAGELQKGNELALPSKYVNFLYLASHYEKLKGSPEDNEQKQLFVEQHKHYLDEIIEQISEFSKRVILADANLDKVLSAYNKHRDKPIREQAENIIHLFTLTNLGAPAAFKYFDTTIDRKRYTSTKEVLDATLIHQSITGLYETRIDLSQLGGDGGEAAAKGSSGGSGGVLNLEEEYRLHEKPVPSSIDPSWLQLFPTVWAERAGMGLANQVPPVVVELRSGASPVAVRQYPMSKEAREGIRPHIQRFLDLGVLVPCQSPWNTPLLPVKKPGTNDYRPVQDLREINKRVQDIHPTVPNPYNLLSSLPPSHTWYSVLDLKDAFFCLKLHPNSQPLFAFEWRDPEKGNTGQLTWTRLPQGFKNSPTLFNEALHRDLAPFRALNPQVVLLQYVDDLLVAAPTYRDCKEGTQKLLQELSKLGYRVSAKKAQLCQKEVTYLGYLLKEGKRWLTPARKATVMKIPPPTTPRQVREFLGTAGFCRLWIPGFASLAAPLYPLTKPSIPFIWTEEHQKAFDRIKEALLSAPALALPDLTKPFTLYVDERAGVARGVLTQTLGPWRRPVAYLSKKLDPVASGWPTCLKAVAAVALLLKDADKLTLGQNVTVIASHSLESIVRQPPDRWMTNARMTHYQSLLLNERVSFAPPAVLNPATLLPVESEATPVHRCSEILAEETGTRRDLKDQPLPGVPAWYTDGSSFIAEGKRRAGAAIVDGKRTVWASSLPEGTSAQKAELVALTQALRLAEGKDINIYTDSRYAFATAHIHGAIYKQRGWLTSAGKDIKNKEEILALLEAIHLPKRVAIIHCPGHQKGNDPVATGNRRADEAAKQAALSTRVLAETTKPAGKRTADGSEFEKRTADGSEFESPKKKAKVE

SEQ ID NO: 7121 - protein, 2096 aa, synthetic construct; identical to SEQ ID NO: 4524

SEQ ID NO: 7122 - protein, 2096 aa, synthetic construct
MPAAKRVKLDGGDKKYSIGLDIGTNSVGWAVITDEYKVPSKKFKVLGNTDRHSIKKNLIGALLFDSGETAEATRLKRTARRRYTRRKNRICYLQEIFSNEMAKVDDSFFHRLEESFLVEEDKKHERHPIFGNIVDEVAYHEKYPTIYHLRKKLVDSTDKADLRLIYLALAHMIKFRGHFLIEGDLNPDNSDVDKLFIQLVQTYNQLFEENPINASGVDAKAILSARLSKSRRLENLIAQLPGEKKNGLFGNLIALSLGLTPNFKSNFDLAEDAKLQLSKDTYDDDLDNLLAQIGDQYADLFLAAKNLSDAILLSDILRVNTEITKAPLSASMIKRYDEHHQDLTLLKALVRQQLPEKYKEIFFDQSKNGYAGYIDGGASQEEFYKFIKPILEKMDGTEELLVKLNREDLLRKQRTFDNGSIPHQIHLGELHAILRRQEDFYPFLKDNREKIEKILTFRIPYYVGPLARGNSRFAWMTRKSEETITPWNFEEVVDKGASAQSFIERMTNFDKNLPNEKVLPKHSLLYEYFTVYNELTKVKYVTEGMRKPAFLSGEQKKAIVDLLFKTNRKVTVKQLKEDYFKKIECFDSVEISGVEDRFNASLGTYHDLLKIIKDKDFLDNEENEDILEDIVLTLTLFEDREMIEERLKTYAHLFDDKVMKQLKRRRYTGWGRLSRKLINGIRDKQSGKTILDFLKSDGFANRNFMQLIHDDSLTFKEDIQKAQVSGQGDSLHEHIANLAGSPAIKKGILQTVKVVDELVKVMGRHKPENIVIEMARENQTTQKGQKNSRERMKRIEEGIKELGSQILKEHPVENTQLQNEKLYLYYLQNGRDMYVDQELDINRLSDYDVDHIVPQSFLKDDSIDNKVLTRSDKARGKSDNVPSEEVVKKMKNYWRQLLNAKLITQRKFDNLTKAERGGLSELDKAGFIKRQLVETRQITKHVAQILDSRMNTKYDENDKLIREVKVITLKSKLVSDFRKDFQFYKVREINNYHHAHDAYLNAVVGTALIKKYPKLESEFVYGDYKVYDVRKMIAKSEQEIGKATAKYFFYSNIMNFFKTEITLANGEIRKRPLIETNGETGEIVWDKGRDFATVRKVLSMPQVNIVKKTEVQTGGFSKESILPKRNSDKLIARKKDWDPKKYGGFDSPTVAYSVLVVAKVEKGKSKKLKSVKELLGITIMERSSFEKNPIDFLEAKGYKEVKKDLIIKLPKYSLFELENGRKRMLASAGELQKGNELALPSKYVNFLYLASHYEKLKGSPEDNEQKQLFVEQHKHYLDEIIEQISEFSKRVILADANLDKVLSAYNKHRDKPIREQAENIIHLFTLTNLGAPAAFKYFDTTIDRKRYTSTKEVLDATLIHQSITGLYETRIDLSQLGGDGGGGSGSSPAPGGTAPLEEEYRLFLEAPIQNVTLLEQWKREIPKVWAEINPPGLASTQAPIHVQLLSTALPVRVRQYPITLEAKRSLRETIRKFRAAGILRPVHSPWNTPLLPVRKSGTSEYRMVQDLREVNKRVETIHPTVPNPYTLLSLLPPDRIWYSVLDLKDAFFCIPLAPESQLIFAFEWADAEEGESGQLTWTRLPQGFKNSPTLFNEALNRDLQGFRLDHPSVSLLQYVDDLLIAADTQAACLSATRDLLMTLAELGYRVSGKKAQLCQEEVTYLGFKIHKGSRSLSNSRTQAILQIPVPKTKRQVREFLGTIGYCRLWIPGFAELAQPLYAATRPGNDPLVWGEKEEEAFQSLKLALTQPPALALPSLDKPFQLFVEETSGAAKGVLTQALGPWKRPVAYLSKRLDPVAAGWPRCLRAIAAAALLTREASKLTFGQDIEITSSHNLESLLRSPPDKWLTNARITQYQVLLLDPPRVRFKQTAALNPATLLPETDDTLPIHHCLDTLDSLTSTRPDLTDQPLAQAEATLFTDGSSYIRDGKRYAGAAVVTLDSVIWAEPLPIGTSAQKAELIALTKALEWSKDKSVNIYTDSRYAFATLHVHGMIYRERGWLTAGGKAIKNAPEILALLTAVWLPKRVAVMHCKGHQKDDAPTSTGNRRADEVAREVAIRPLSTQATISAGKRTADGSEFEKRTADGSEFESPKKKAKVE

SEQ ID NO: 7123 - protein, 2096 aa, synthetic construct
MPAAKRVKLDGGDKKYSIGLDIGTNSVGWAVITDEYKVPSKKFKVLGNTDRHSIKKNLIGALLFDSGETAEATRLKRTARRRYTRRKNRICYLQEIFSNEMAKVDDSFFHRLEESFLVEEDKKHERHPIFGNIVDEVAYHEKYPTIYHLRKKLVDSTDKADLRLIYLALAHMIKFRGHFLIEGDLNPDNSDVDKLFIQLVQTYNQLFEENPINASGVDAKAILSARLSKSRRLENLIAQLPGEKKNGLFGNLIALSLGLTPNFKSNFDLAEDAKLQLSKDTYDDDLDNLLAQIGDQYADLFLAAKNLSDAILLSDILRVNTEITKAPLSASMIKRYDEHHQDLTLLKALVRQQLPEKYKEIFFDQSKNGYAGYIDGGASQEEFYKFIKPILEKMDGTEELLVKLNREDLLRKQRTFDNGSIPHQIHLGELHAILRRQEDFYPFLKDNREKIEKILTFRIPYYVGPLARGNSRFAWMTRKSEETITPWNFEEVVDKGASAQSFIERMTNFDKNLPNEKVLPKHSLLYEYFTVYNELTKVKYVTEGMRKPAFLSGEQKKAIVDLLFKTNRKVTVKQLKEDYFKKIECFDSVEISGVEDRFNASLGTYHDLLKIIKDKDFLDNEENEDILEDIVLTLTLFEDREMIEERLKTYAHLFDDKVMKQLKRRRYTGWGRLSRKLINGIRDKQSGKTILDFLKSDGFANRNFMQLIHDDSLTFKEDIQKAQVSGQGDSLHEHIANLAGSPAIKKGILQTVKVVDELVKVMGRHKPENIVIEMARENQTTQKGQKNSRERMKRIEEGIKELGSQILKEHPVENTQLQNEKLYLYYLQNGRDMYVDQELDINRLSDYDVDHIVPQSFLKDDSIDNKVLTRSDKARGKSDNVPSEEVVKKMKNYWRQLLNAKLITQRKFDNLTKAERGGLSELDKAGFIKRQLVETRQITKHVAQILDSRMNTKYDENDKLIREVKVITLKSKLVSDFRKDFQFYKVREINNYHHAHDAYLNAVVGTALIKKYPKLESEFVYGDYKVYDVRKMIAKSEQEIGKATAKYFFYSNIMNFFKTEITLANGEIRKRPLIETNGETGEIVWDKGRDFATVRKVLSMPQVNIVKKTEVQTGGFSKESILPKRNSDKLIARKKDWDPKKYGGFDSPTVAYSVLVVAKVEKGKSKKLKSVKELLGITIMERSSFEKNPIDFLEAKGYKEVKKDLIIKLPKYSLFELENGRKRMLASAGELQKGNELALPSKYVNFLYLASHYEKLKGSPEDNEQKQLFVEQHKHYLDEIIEQISEFSKRVILADANLDKVLSAYNKHRDKPIREQAENIIHLFTLTNLGAPAAFKYFDTTIDRKRYTSTKEVLDATLIHQSITGLYETRIDLSQLGGDGGGGSGSSPAPGGTAPLEEEYRLFLEAPIQNVTLLEQWKREIPKVWAEINPPGLASTQAPIHVQLLSTALPVRVRQYPITLEAKRSLRETIRKFRAAGILRPVHSPWNTPLLPVRKSGTSEYRMVQDLREVNKRVETIHPTVPNPYTLLSLLPPDRIWYSVLDLKDAFFCIPLAPESQLIFAFEWADAEEGESGQLTWTRLPQGFKNSPTLFNEALNRDLQGFRLDHPSVSLLQYVDDLLIAADTQAACLSATRDLLMTLAELGYRVSGKKAQLCQEEVTYLGFKIHKGSRSLSNSRTQAILQIPVPKTKRQVREFLGKIGYCRLFIPGFAELAQPLYAATRPGNDPLVWGEKEEEAFQSLKLALTQPPALALPSLDKPFQLFVEETSGAAKGVLTQALGPWKRPVAYLSKRLDPVAAGWPRCLRAIAAAALLTREASKLTFGQDIEITSSHNLESLLRSPPDKWLTNARITQYQVLLLDPPRVRFKQTAALNPATLLPETDDTLPIHHCLDTLDSLTSTRPDLTDQPLAQAEATLFTDGSSYIRDGKRYAGAAVVTLDSVIWAEPLPIGTSAQKAELIALTKALEWSKDKSVNIYTDSRYAFATLHVHGMIYRERGWLTAGGKAIKNAPEILALLTAVWLPKRVAVMHCKGHQKDDAPTSTGNRRADEVAREVAIRPLSTQATISAGKRTADGSEFEKRTADGSEFESPKKKAKVE

SEQ ID NO: 7124 - protein, 2093 aa, synthetic construct
MPAAKRVKLDGGDKKYSIGLDIGTNSVGWAVITDEYKVPSKKFKVLGNTDRHSIKKNLIGALLFDSGETAEATRLKRTARRRYTRRKNRICYLQEIFSNEMAKVDDSFFHRLEESFLVEEDKKHERHPIFGNIVDEVAYHEKYPTIYHLRKKLVDSTDKADLRLIYLALAHMIKFRGHFLIEGDLNPDNSDVDKLFIQLVQTYNQLFEENPINASGVDAKAILSARLSKSRRLENLIAQLPGEKKNGLFGNLIALSLGLTPNFKSNFDLAEDAKLQLSKDTYDDDLDNLLAQIGDQYADLFLAAKNLSDAILLSDILRVNTEITKAPLSASMIKRYDEHHQDLTLLKALVRQQLPEKYKEIFFDQSKNGYAGYIDGGASQEEFYKFIKPILEKMDGTEELLVKLNREDLLRKQRTFDNGSIPHQIHLGELHAILRRQEDFYPFLKDNREKIEKILTFRIPYYVGPLARGNSRFAWMTRKSEETITPWNFEEVVDKGASAQSFIERMTNFDKNLPNEKVLPKHSLLYEYFTVYNELTKVKYVTEGMRKPAFLSGEQKKAIVDLLFKTNRKVTVKQLKEDYFKKIECFDSVEISGVEDRFNASLGTYHDLLKIIKDKDFLDNEENEDILEDIVLTLTLFEDREMIEERLKTYAHLFDDKVMKQLKRRRYTGWGRLSRKLINGIRDKQSGKTILDFLKSDGFANRNFMQLIHDDSLTFKEDIQKAQVSGQGDSLHEHIANLAGSPAIKKGILQTVKVVDELVKVMGRHKPENIVIEMARENQTTQKGQKNSRERMKRIEEGIKELGSQILKEHPVENTQLQNEKLYLYYLQNGRDMYVDQELDINRLSDYDVDHIVPQSFLKDDSIDNKVLTRSDKARGKSDNVPSEEVVKKMKNYWRQLLNAKLITQRKFDNLTKAERGGLSELDKAGFIKRQLVETRQITKHVAQILDSRMNTKYDENDKLIREVKVITLKSKLVSDFRKDFQFYKVREINNYHHAHDAYLNAVVGTALIKKYPKLESEFVYGDYKVYDVRKMIAKSEQEIGKATAKYFFYSNIMNFFKTEITLANGEIRKRPLIETNGETGEIVWDKGRDFATVRKVLSMPQVNIVKKTEVQTGGFSKESILPKRNSDKLIARKKDWDPKKYGGFDSPTVAYSVLVVAKVEKGKSKKLKSVKELLGITIMERSSFEKNPIDFLEAKGYKEVKKDLIIKLPKYSLFELENGRKRMLASAGELQKGNELALPSKYVNFLYLASHYEKLKGSPEDNEQKQLFVEQHKHYLDEIIEQISEFSKRVILADANLDKVLSAYNKHRDKPIREQAENIIHLFTLTNLGAPAAFKYFDTTIDRKRYTSTKEVLDATLIHQSITGLYETRIDLSQLGGDGGGGSGSSPAPGGTLQLEEEYRLFEPESTQKQEMDIWLKNFPQAWAETGGMGTAHCQAPVLIQLKATATPISIRQYPMPHEAYQGIKPHIRRMLDQGILKPCQSPWNTPLLPVKKPGTEDYRPVQDLREVNKRVEDIHPTVPNPYNLLSTLPPSHPWYTVLDLKDAFFCLRLHSESQLLFAFEWRDPEIGLSGQLTWTRLPQGFKNSPTLFNEALHSDLADFRVRYPALVLLQYVDDLLLAAATRTECLEGTKALLETLGNKGYRASAKKAQICLQEVTYLGYSLKDGQRWLTKARKEAILSIPVPKNSRQVREFLGTAGYCRLWIPGFAELAAPLYPLTRPGTLFQWGTEQQLAFEDIKKALLSSPALGLPDITKPFELFIDENSGFAKGVLVQKLGPWKRPVAYLSKKLDTVASGWPPCLRMVAAIAILVKDAGKLTLGQPLTILTSHPVEALVRQPPNKWLSNARMTHYQAMLLDAERVHFGPTVSLNPATLLPLPSGGNHHDCLQILAETHGTRPDLTDQPLPDADLTWYTDGSSFIRNGEREAGAAVTTESEVIWAAPLPPGTSAQRAELIALTQALKMAEGKKLTVYTDSRYAFATTHVHGEIYRRRGWLTSEGKEIKNKNEILALLEALFLPKRLSIIHCPGHQKGDSPQAKGNRLADDTAKKAATETHSSLTVLPAGKRTADGSEFEKRTADGSEFESPKKKAKVE

SEQ ID NO: 7125 - protein, 2085 aa, synthetic construct
MPAAKRVKLDGGDKKYSIGLDIGTNSVGWAVITDEYKVPSKKFKVLGNTDRHSIKKNLIGALLFDSGETAEATRLKRTARRRYTRRKNRICYLQEIFSNEMAKVDDSFFHRLEESFLVEEDKKHERHPIFGNIVDEVAYHEKYPTIYHLRKKLVDSTDKADLRLIYLALAHMIKFRGHFLIEGDLNPDNSDVDKLFIQLVQTYNQLFEENPINASGVDAKAILSARLSKSRRLENLIAQLPGEKKNGLFGNLIALSLGLTPNFKSNFDLAEDAKLQLSKDTYDDDLDNLLAQIGDQYADLFLAAKNLSDAILLSDILRVNTEITKAPLSASMIKRYDEHHQDLTLLKALVRQQLPEKYKEIFFDQSKNGYAGYIDGGASQEEFYKFIKPILEKMDGTEELLVKLNREDLLRKQRTFDNGSIPHQIHLGELHAILRRQEDFYPFLKDNREKIEKILTFRIPYYVGPLARGNSRFAWMTRKSEETITPWNFEEVVDKGASAQSFIERMTNFDKNLPNEKVLPKHSLLYEYFTVYNELTKVKYVTEGMRKPAFLSGEQKKAIVDLLFKTNRKVTVKQLKEDYFKKIECFDSVEISGVEDRFNASLGTYHDLLKIIKDKDFLDNEENEDILEDIVLTLTLFEDREMIEERLKTYAHLFDDKVMKQLKRRRYTGWGRLSRKLINGIRDKQSGKTILDFLKSDGFANRNFMQLIHDDSLTFKEDIQKAQVSGQGDSLHEHIANLAGSPAIKKGILQTVKVVDELVKVMGRHKPENIVIEMARENQTTQKGQKNSRERMKRIEEGIKELGSQILKEHPVENTQLQNEKLYLYYLQNGRDMYVDQELDINRLSDYDVDHIVPQSFLKDDSIDNKVLTRSDKARGKSDNVPSEEVVKKMKNYWRQLLNAKLITQRKFDNLTKAERGGLSELDKAGFIKRQLVETRQITKHVAQILDSRMNTKYDENDKLIREVKVITLKSKLVSDFRKDFQFYKVREINNYHHAHDAYLNAVVGTALIKKYPKLESEFVYGDYKVYDVRKMIAKSEQEIGKATAKYFFYSNIMNFFKTEITLANGEIRKRPLIETNGETGEIVWDKGRDFATVRKVLSMPQVNIVKKTEVQTGGFSKESILPKRNSDKLIARKKDWDPKKYGGFDSPTVAYSVLVVAKVEKGKSKKLKSVKELLGITIMERSSFEKNPIDFLEAKGYKEVKKDLIIKLPKYSLFELENGRKRMLASAGELQKGNELALPSKYVNFLYLASHYEKLKGSPEDNEQKQLFVEQHKHYLDEIIEQISEFSKRVILADANLDKVLSAYNKHRDKPIREQAENIIHLFTLTNLGAPAAFKYFDTTIDRKRYTSTKEVLDATLIHQSITGLYETRIDLSQLGGDGGGGSGSSPAPGGVPWLTQQPLQLTILVPLQEYQEKILSKTALPEDQKQQLKTLFVKYDNLWQHWENQVGHRKIRPHNIATGDYPPRPQKQYPINPKAKPSIQIVIDDLLKQGVLTPQNSTMNTPVYPVPKPDGRWRMVLDYREVNKTIPLTAAQNQHSAGILATIVRQKYKTTLDLANGFWAHPITPESYWLTAFTWQGKQYCWTRLPQGFLNSPALFNADVVDLLKEIPNVQVYVDDIYLSHDDPKEHVQQLEKVFQILLQAGYVVSLKKSEIGQKTVEFLGFNITKEGRGLTDTFKTKLLNITPPKDLKQLQSILGLLNFARNFIPNFAELVQPLYNLIAPAKGKYIEWSEENTKQLNMVIEALNTASNLEERLPEQRLVIKVNTSPSAGYVRYYNETGKKPIMYLNYVFSKAELKFSMLEKLLTTMHKALIKAMDLAMGQEILVYSPIVSMTKIQKTPLPERKALPIRWITWMTYLEDPRIQFHYDKTLPELKHIPDVYTSSQSPVKHPSQYEGVFYTDGSAIKSPDPTKSNNAGMGIVHATYKPEYQVLNQWSIPLGNHTAQMAEIAAVEFACKKALKIPGPVLVITDSFYVAESANKELPYWKSNGFVNNKKKPLKHISKWKSIAECLSMKPDITIQHEKGISLQIPVFILKGNALADKLATQGSYVVNAGKRTADGSEFEKRTADGSEFESPKKKAKVE

SEQ ID NO: 7126 - protein, 2216 aa, synthetic construct
MPAAKRVKLDGGDKKYSIGLDIGTNSVGWAVITDEYKVPSKKFKVLGNTDRHSIKKNLIGALLFDSGETAEATRLKRTARRRYTRRKNRICYLQEIFSNEMAKVDDSFFHRLEESFLVEEDKKHERHPIFGNIVDEVAYHEKYPTIYHLRKKLVDSTDKADLRLIYLALAHMIKFRGHFLIEGDLNPDNSDVDKLFIQLVQTYNQLFEENPINASGVDAKAILSARLSKSRRLENLIAQLPGEKKNGLFGNLIALSLGLTPNFKSNFDLAEDAKLQLSKDTYDDDLDNLLAQIGDQYADLFLAAKNLSDAILLSDILRVNTEITKAPLSASMIKRYDEHHQDLTLLKALVRQQLPEKYKEIFFDQSKNGYAGYIDGGASQEEFYKFIKPILEKMDGTEELLVKLNREDLLRKQRTFDNGSIPHQIHLGELHAILRRQEDFYPFLKDNREKIEKILTFRIPYYVGPLARGNSRFAWMTRKSEETITPWNFEEVVDKGASAQSFIERMTNFDKNLPNEKVLPKHSLLYEYFTVYNELTKVKYVTEGMRKPAFLSGEQKKAIVDLLFKTNRKVTVKQLKEDYFKKIECFDSVEISGVEDRFNASLGTYHDLLKIIKDKDFLDNEENEDILEDIVLTLTLFEDREMIEERLKTYAHLFDDKVMKQLKRRRYTGWGRLSRKLINGIRDKQSGKTILDFLKSDGFANRNFMQLIHDDSLTFKEDIQKAQVSGQGDSLHEHIANLAGSPAIKKGILQTVKVVDELVKVMGRHKPENIVIEMARENQTTQKGQKNSRERMKRIEEGIKELGSQILKEHPVENTQLQNEKLYLYYLQNGRDMYVDQELDINRLSDYDVDHIVPQSFLKDDSIDNKVLTRSDKARGKSDNVPSEEVVKKMKNYWRQLLNAKLITQRKFDNLTKAERGGLSELDKAGFIKRQLVETRQITKHVAQILDSRMNTKYDENDKLIREVKVITLKSKLVSDFRKDFQFYKVREINNYHHAHDAYLNAVVGTALIKKYPKLESEFVYGDYKVYDVRKMIAKSEQEIGKATAKYFFYSNIMNFFKTEITLANGEIRKRPLIETNGETGEIVWDKGRDFATVRKVLSMPQVNIVKKTEVQTGGFSKESILPKRNSDKLIARKKDWDPKKYGGFDSPTVAYSVLVVAKVEKGKSKKLKSVKELLGITIMERSSFEKNPIDFLEAKGYKEVKKDLIIKLPKYSLFELENGRKRMLASAGELQKGNELALPSKYVNFLYLASHYEKLKGSPEDNEQKQLFVEQHKHYLDEIIEQISEFSKRVILADANLDKVLSAYNKHRDKPIREQAENIIHLFTLTNLGAPAAFKYFDTTIDRKRYTSTKEVLDATLIHQSITGLYETRIDLSQLGGDGGGGSGSSPAPGGTLGDQGSRGSDPLPEPRVTLTVEGIPTEFLVNTGAEHSVLTKPMGKMGSKRTVVAGATGSKVYPWTTKRLLKIGQKQVTHSFLVIPECPAPLLGRDLLTKLKAQIQFSTEGPQVTWEDRPAMCLVLNLEEEYRLHEKPVPPSIDPSWLQLFPMVWAEKAGMGLANQVPPVVVELKSDASPVAVRQYPMSKEAREGIRPHIQRFLDLGILVPCQSPWNTPLLPVKKPGTNDYRPVQDLREVNKRVQDIHPTVPNPYNLLSSLPPSHTWYSVLDLKDAFFCLKLHPNSQPLFAFEWRDPEKGNTGQLTWTRLPQGFKNSPTLFDEALHRDLASFRALNPQVVMLQYVDDLLVAAPTYRDCKEGTRRLLQELSKLGYRVSAKKAQLCREEVTYLGYLLKGGKRWLTPARKATVMKIPTPTTPRQVREFLGTAGFCRLWIPGFASLAAPLYPLTREKVPFTWTEAHQEAFGRIKEALLSAPALALPDLTKPFALYVDEKEGVARGVLTQTLGPWRRPVAYLSKKLDPVASGWPTCLKAIAAVALLLKDADKLTLGQNVLVIAPHNLESIVRQPPDRWMTNARMTHYQSLLLNERVSFAPPAILNPATLLPVESDDTPIHICSEILAEETGTRPDLRDQPLPGVPAWYTDGSSFIMDGRRQAGAAIVDNKRTVWASNLPEGTSAQKAELIALTQALRLAEGKSINIYTDSRYAFATAHVHGAIYKQRGLLTSAGKDIKNKEEILALLEAIHLPKRVAIIHCPGHQRGTDPVATGNRKADEAAKQAAQSTRILTETTKNAGKRTADGSEFEKRTADGSEFESPKKKAKVE

SEQ ID NO: 7127 - protein, 2125 aa, synthetic construct
MPAAKRVKLDGGDKKYSIGLDIGTNSVGWAVITDEYKVPSKKFKVLGNTDRHSIKKNLIGALLFDSGETAEATRLKRTARRRYTRRKNRICYLQEIFSNEMAKVDDSFFHRLEESFLVEEDKKHERHPIFGNIVDEVAYHEKYPTIYHLRKKLVDSTDKADLRLIYLALAHMIKFRGHFLIEGDLNPDNSDVDKLFIQLVQTYNQLFEENPINASGVDAKAILSARLSKSRRLENLIAQLPGEKKNGLFGNLIALSLGLTPNFKSNFDLAEDAKLQLSKDTYDDDLDNLLAQIGDQYADLFLAAKNLSDAILLSDILRVNTEITKAPLSASMIKRYDEHHQDLTLLKALVRQQLPEKYKEIFFDQSKNGYAGYIDGGASQEEFYKFIKPILEKMDGTEELLVKLNREDLLRKQRTFDNGSIPHQIHLGELHAILRRQEDFYPFLKDNREKIEKILTFRIPYYVGPLARGNSRFAWMTRKSEETITPWNFEEVVDKGASAQSFIERMTNFDKNLPNEKVLPKHSLLYEYFTVYNELTKVKYVTEGMRKPAFLSGEQKKAIVDLLFKTNRKVTVKQLKEDYFKKIECFDSVEISGVEDRFNASLGTYHDLLKIIKDKDFLDNEENEDILEDIVLTLTLFEDREMIEERLKTYAHLFDDKVMKQLKRRRYTGWGRLSRKLINGIRDKQSGKTILDFLKSDGFANRNFMQLIHDDSLTFKEDIQKAQVSGQGDSLHEHIANLAGSPAIKKGILQTVKVVDELVKVMGRHKPENIVIEMARENQTTQKGQKNSRERMKRIEEGIKELGSQILKEHPVENTQLQNEKLYLYYLQNGRDMYVDQELDINRLSDYDVDHIVPQSFLKDDSIDNKVLTRSDKARGKSDNVPSEEVVKKMKNYWRQLLNAKLITQRKFDNLTKAERGGLSELDKAGFIKRQLVETRQITKHVAQILDSRMNTKYDENDKLIREVKVITLKSKLVSDFRKDFQFYKVREINNYHHAHDAYLNAVVGTALIKKYPKLESEFVYGDYKVYDVRKMIAKSEQEIGKATAKYFFYSNIMNFFKTEITLANGEIRKRPLIETNGETGEIVWDKGRDFATVRKVLSMPQVNIVKKTEVQTGGFSKESILPKRNSDKLIARKKDWDPKKYGGFDSPTVAYSVLVVAKVEKGKSKKLKSVKELLGITIMERSSFEKNPIDFLEAKGYKEVKKDLIIKLPKYSLFELENGRKRMLASAGELQKGNELALPSKYVNFLYLASHYEKLKGSPEDNEQKQLFVEQHKHYLDEIIEQISEFSKRVILADANLDKVLSAYNKHRDKPIREQAENIIHLFTLTNLGAPAAFKYFDTTIDRKRYTSTKEVLDATLIHQSITGLYETRIDLSQLGGDGGGGSGSSPAPGGLLGRDLLTKLKAQIQFSTEGPQVTWEDRPAMCLVLNLEEEYRLHEKPVPPSIDPSWLQLFPMVWAEKAGMGLANQVPPVVVELKSDASPVAVRQYPMSKEAREGIRPHIQRFLDLGILVPCQSPWNTPLLPVKKPGTNDYRPVQDLREVNKRVQDIHPTVPNPYNLLSSLPPSHTWYSVLDLKDAFFCLKLHPNSQPLFAFEWRDPEKGNTGQLTWTRLPQGFKNSPTLFNEALHRDLASFRALNPQVVMLQYVDDLLVAAPTYRDCKEGTRRLLQELSKLGYRVSAKKAQLCREEVTYLGYLLKGGKRWLTPARKATVMKIPTPTTPRQVREFLGKAGFCRLFIPGFASLAAPLYPLTRPKVPFTWTEAHQEAFGRIKEALLSAPALALPDLTKPFALYVDEKEGVARGVLTQTLGPWRRPVAYLSKKLDPVASGWPTCLKAIAAVALLLKDADKLTLGQNVLVIAPHNLESIVRQPPDRWMTNARMTHYQSLLLNERVSFAPPAILNPATLLPVESDDTPIHICSEILAEETGTRPDLRDQPLPGVPAWYTDGSSFIMDGRRQAGAAIVDNKRTVWASNLPEGTSAQKAELIALTQALRLAEGKSINIYTDSRYAFATAHVHGAIYKQRGWLTSAGKDIKNKEEILALLEAIHLPKRVAIIHCPGHQRGTDPVATGNRKADEAAKQAAQSTRILTETTKNAGKRTADGSEFEKRTADGSEFESPKKKAKVE

SEQ ID NO: 7128 - protein, 2216 aa, synthetic construct
MPAAKRVKLDGGDKKYSIGLDIGTNSVGWAVITDEYKVPSKKFKVLGNTDRHSIKKNLIGALLFDSGETAEATRLKRTARRRYTRRKNRICYLQEIFSNEMAKVDDSFFHRLEESFLVEEDKKHERHPIFGNIVDEVAYHEKYPTIYHLRKKLVDSTDKADLRLIYLALAHMIKFRGHFLIEGDLNPDNSDVDKLFIQLVQTYNQLFEENPINASGVDAKAILSARLSKSRRLENLIAQLPGEKKNGLFGNLIALSLGLTPNFKSNFDLAEDAKLQLSKDTYDDDLDNLLAQIGDQYADLFLAAKNLSDAILLSDILRVNTEITKAPLSASMIKRYDEHHQDLTLLKALVRQQLPEKYKEIFFDQSKNGYAGYIDGGASQEEFYKFIKPILEKMDGTEELLVKLNREDLLRKQRTFDNGSIPHQIHLGELHAILRRQEDFYPFLKDNREKIEKILTFRIPYYVGPLARGNSRFAWMTRKSEETITPWNFEEVVDKGASAQSFIERMTNFDKNLPNEKVLPKHSLLYEYFTVYNELTKVKYVTEGMRKPAFLSGEQKKAIVDLLFKTNRKVTVKQLKEDYFKKIECFDSVEISGVEDRFNASLGTYHDLLKIIKDKDFLDNEENEDILEDIVLTLTLFEDREMIEERLKTYAHLFDDKVMKQLKRRRYTGWGRLSRKLINGIRDKQSGKTILDFLKSDGFANRNFMQLIHDDSLTFKEDIQKAQVSGQGDSLHEHIANLAGSPAIKKGILQTVKVVDELVKVMGRHKPENIVIEMARENQTTQKGQKNSRERMKRIEEGIKELGSQILKEHPVENTQLQNEKLYLYYLQNGRDMYVDQELDINRLSDYDVDHIVPQSFLKDDSIDNKVLTRSDKARGKSDNVPSEEVVKKMKNYWRQLLNAKLITQRKFDNLTKAERGGLSELDKAGFIKRQLVETRQITKHVAQILDSRMNTKYDENDKLIREVKVITLKSKLVSDFRKDFQFYKVREINNYHHAHDAYLNAVVGTALIKKYPKLESEFVYGDYKVYDVRKMIAKSEQEIGKATAKYFFYSNIMNFFKTEITLANGEIRKRPLIETNGETGEIVWDKGRDFATVRKVLSMPQVNIVKKTEVQTGGFSKESILPKRNSDKLIARKKDWDPKKYGGFDSPTVAYSVLVVAKVEKGKSKKLKSVKELLGITIMERSSFEKNPIDFLEAKGYKEVKKDLIIKLPKYSLFELENGRKRMLASAGELQKGNELALPSKYVNFLYLASHYEKLKGSPEDNEQKQLFVEQHKHYLDEIIEQISEFSKRVILADANLDKVLSAYNKHRDKPIREQAENIIHLFTLTNLGAPAAFKYFDTTIDRKRYTSTKEVLDATLIHQSITGLYETRIDLSQLGGDGGGGSGSSPAPGGTLGDQGSRGSDPLPEPRVTLTVEGIPTEFLVNTGAEHSVLTKPMGKMGSKRTVVAGATGSKVYPWTTKRLLKIGQKQVTHSFLVIPECPAPLLGRDLLTKLKAQIQFSTEGPQVTWEDRPAMCLVLNLEEEYRLHEKPVPPSIDPSWLQLFPMVWAEKAGMGLANQVPPVVVELKSDASPVAVRQYPMSKEAREGIRPHIQRFLDLGILVPCQSPWNTPLLPVKKPGTNDYRPVQDLREVNKRVQDIHPTVPNPYNLLSSLPPSHTWYSVLDLKDAFFCLKLHPNSQPLFAFEWRDPEKGNTGQLTWTRLPQGFKNSPTLFNEALHRDLASFRALNPQVVMLQYVDDLLVAAPTYRDCKEGTRRLLQELSKLGYRVSAKKAQLCREEVTYLGYLLKGGKRWLTPARKATVMKIPTPTTPRQVREFLGKAGFCRLFIPGFASLAAPLYPLTRPKVPFTWTEAHQEAFGRIKEALLSAPALALPDLTKPFALYVDEKEGVARGVLTQTLGPWRRPVAYLSKKLDPVASGWPTCLKAIAAVALLLKDADKLTLGQNVLVIAPHNLESIVRQPPDRWMTNARMTHYQSLLLNERVSFAPPAILNPATLLPVESDDTPIHICSEILAEETGTRPDLRDQPLPGVPAWYTDGSSFIMDGRRQAGAAIVDNKRTVWASNLPEGTSAQKAELIALTQALRLAEGKSINIYTDSRYAFATAHVHGAIYKQRGWLTSAGKDIKNKEEILALLEAIHLPKRVAIIHCPGHQRGTDPVATGNRKADEAAKQAAQSTRILTETTKNAGKRTADGSEFEKRTADGSEFESPKKKAKVE

SEQ ID NO: 7129 - protein, 2094 aa, synthetic construct
MPAAKRVKLDGGDKKYSIGLDIGTNSVGWAVITDEYKVPSKKFKVLGNTDRHSIKKNLIGALLFDSGETAEATRLKRTARRRYTRRKNRICYLQEIFSNEMAKVDDSFFHRLEESFLVEEDKKHERHPIFGNIVDEVAYHEKYPTIYHLRKKLVDSTDKADLRLIYLALAHMIKFRGHFLIEGDLNPDNSDVDKLFIQLVQTYNQLFEENPINASGVDAKAILSARLSKSRRLENLIAQLPGEKKNGLFGNLIALSLGLTPNFKSNFDLAEDAKLQLSKDTYDDDLDNLLAQIGDQYADLFLAAKNLSDAILLSDILRVNTEITKAPLSASMIKRYDEHHQDLTLLKALVRQQLPEKYKEIFFDQSKNGYAGYIDGGASQEEFYKFIKPILEKMDGTEELLVKLNREDLLRKQRTFDNGSIPHQIHLGELHAILRRQEDFYPFLKDNREKIEKILTFRIPYYVGPLARGNSRFAWMTRKSEETITPWNFEEVVDKGASAQSFIERMTNFDKNLPNEKVLPKHSLLYEYFTVYNELTKVKYVTEGMRKPAFLSGEQKKAIVDLLFKTNRKVTVKQLKEDYFKKIECFDSVEISGVEDRFNASLGTYHDLLKIIKDKDFLDNEENEDILEDIVLTLTLFEDREMIEERLKTYAHLFDDKVMKQLKRRRYTGWGRLSRKLINGIRDKQSGKTILDFLKSDGFANRNFMQLIHDDSLTFKEDIQKAQVSGQGDSLHEHIANLAGSPAIKKGILQTVKVVDELVKVMGRHKPENIVIEMARENQTTQKGQKNSRERMKRIEEGIKELGSQILKEHPVENTQLQNEKLYLYYLQNGRDMYVDQELDINRLSDYDVDHIVPQSFLKDDSIDNKVLTRSDKARGKSDNVPSEEVVKKMKNYWRQLLNAKLITQRKFDNLTKAERGGLSELDKAGFIKRQLVETRQITKHVAQILDSRMNTKYDENDKLIREVKVITLKSKLVSDFRKDFQFYKVREINNYHHAHDAYLNAVVGTALIKKYPKLESEFVYGDYKVYDVRKMIAKSEQEIGKATAKYFFYSNIMNFFKTEITLANGEIRKRPLIETNGETGEIVWDKGRDFATVRKVLSMPQVNIVKKTEVQTGGFSKESILPKRNSDKLIARKKDWDPKKYGGFDSPTVAYSVLVVAKVEKGKSKKLKSVKELLGITIMERSSFEKNPIDFLEAKGYKEVKKDLIIKLPKYSLFELENGRKRMLASAGELQKGNELALPSKYVNFLYLASHYEKLKGSPEDNEQKQLFVEQHKHYLDEIIEQISEFSKRVILADANLDKVLSAYNKHRDKPIREQAENIIHLFTLTNLGAPAAFKYFDTTIDRKRYTSTKEVLDATLIHQSITGLYETRIDLSQLGGDGGGGSGSSPAPGGTLNLEDEYRLYETSAEPEVSPGSTWLSDFPQAWAETGGMGLAVRQAPLIIPLKATSTPVSIKQYPMSQEAKLGIKPHIQRLLDQGILVPCQSPWNTPLLPVKKPGTNDYRPVQDLREVNKRVEDIHPTVPNPYNLLSGLPPSHRWYTVLDLKDAFFCLRLHPTSQPLFAFEWRDPGMGISGQLTWTRLPQGFKNSPTLFNEALHRDLADFRIQHPDLILLQYVDDILLAATSELDCQQGTRALLLTLGNLGYRASAKKAQLCQKQVKYLGYLLKEGQRWLTEARKETVMGQPTPKTPRQLREFLGKAGFCRLFIPGFAEMAAPLYPLTKPGTLFNWGPDQQKAYQEIKQALLTAPALGLPDLTKPFELFVDEKQGYAKGVLTQKLGPWRRPVAYLSKKLDPVAAGWPPCLRMVAAIAVLRKDAGKLTMGQPLVILAPHAVEALVKQPPDRWLSNARMTHYQAMLLDTDRVQFGPVVALNPATLLPLPEEGAPHDCLEILAETHGTRPDLTDQPIPDADHTWYTDGSSFLQEGQRKAGAAVTTETEVIWARALPAGTSAQRAELIALTQALKMAEGKRLNVYTDSRYAFATAHIHGEIYRRRGWLTSEGREIKNKSEILALLKALFLPKRLSIIHCLGHQKGDSAEARGNRLADQAAREAAIKTPPDTSTLLAGKRTADGSEFEKRTADGSEFESPKKKAKVE

SEQ ID NO: 7130 - protein, 2094 aa, synthetic construct
MPAAKRVKLDGGDKKYSIGLDIGTNSVGWAVITDEYKVPSKKFKVLGNTDRHSIKKNLIGALLFDSGETAEATRLKRTARRRYTRRKNRICYLQEIFSNEMAKVDDSFFHRLEESFLVEEDKKHERHPIFGNIVDEVAYHEKYPTIYHLRKKLVDSTDKADLRLIYLALAHMIKFRGHFLIEGDLNPDNSDVDKLFIQLVQTYNQLFEENPINASGVDAKAILSARLSKSRRLENLIAQLPGEKKNGLFGNLIALSLGLTPNFKSNFDLAEDAKLQLSKDTYDDDLDNLLAQIGDQYADLFLAAKNLSDAILLSDILRVNTEITKAPLSASMIKRYDEHHQDLTLLKALVRQQLPEKYKEIFFDQSKNGYAGYIDGGASQEEFYKFIKPILEKMDGTEELLVKLNREDLLRKQRTFDNGSIPHQIHLGELHAILRRQEDFYPFLKDNREKIEKILTFRIPYYVGPLARGNSRFAWMTRKSEETITPWNFEEVVDKGASAQSFIERMTNFDKNLPNEKVLPKHSLLYEYFTVYNELTKVKYVTEGMRKPAFLSGEQKKAIVDLLFKTNRKVTVKQLKEDYFKKIECFDSVEISGVEDRFNASLGTYHDLLKIIKDKDFLDNEENEDILEDIVLTLTLFEDREMIEERLKTYAHLFDDKVMKQLKRRRYTGWGRLSRKLINGIRDKQSGKTILDFLKSDGFANRNFMQLIHDDSLTFKEDIQKAQVSGQGDSLHEHIANLAGSPAIKKGILQTVKVVDELVKVMGRHKPENIVIEMARENQTTQKGQKNSRERMKRIEEGIKELGSQILKEHPVENTQLQNEKLYLYYLQNGRDMYVDQELDINRLSDYDVDHIVPQSFLKDDSIDNKVLTRSDKARGKSDNVPSEEVVKKMKNYWRQLLNAKLITQRKFDNLTKAERGGLSELDKAGFIKRQLVETRQITKHVAQILDSRMNTKYDENDKLIREVKVITLKSKLVSDFRKDFQFYKVREINNYHHAHDAYLNAVVGTALIKKYPKLESEFVYGDYKVYDVRKMIAKSEQEIGKATAKYFFYSNIMNFFKTEITLANGEIRKRPLIETNGETGEIVWDKGRDFATVRKVLSMPQVNIVKKTEVQTGGFSKESILPKRNSDKLIARKKDWDPKKYGGFDSPTVAYSVLVVAKVEKGKSKKLKSVKELLGITIMERSSFEKNPIDFLEAKGYKEVKKDLIIKLPKYSLFELENGRKRMLASAGELQKGNELALPSKYVNFLYLASHYEKLKGSPEDNEQKQLFVEQHKHYLDEIIEQISEFSKRVILADANLDKVLSAYNKHRDKPIREQAENIIHLFTLTNLGAPAAFKYFDTTIDRKRYTSTKEVLDATLIHQSITGLYETRIDLSQLGGDGGGGSGSSPAPGGLGIEDEYRLHETSTEPDVSLGSTWLSDFPQAWAETGGMGLAVRQAPLIIPLKATSTPVSIQQYPMSHEARLGIKPHIQRLLDQGILVPCQSPWNTPLLPVKKPGTNDYRPVQDLREVNKRVEDIHPTVPNPYNLLSGLPPSHQWYTVLDLKDAFFCLRLHPTSQPLFAFEWRDPGMGISGQLTWTRLPQGFKNSPTLFNEALHRDLADFRIQHPDLILLQYVDDILLAATSELDCQQGTRALLQTLGDLGYRASAKKAQICQKQVKYLGYLLREGQRWLTEARKETVMGQPVPKTPRQLREFLGKAGFCRLFIPGFAEMAAPLYPLTKPGTLFSWGPDQQKAYQEIKQALLTAPALGLPDLTKPFELFVDEKQGYAKGVLTQKLGPWRRPVAYLSKKLDPVAAGWPPCLRMVAAIAVLTKDAGKLTMGQPLVILAPHAVEALVKQPPDRWLSNARMTHYQAMLLDTDRVQFGPVVALNPATLLPLPEEGAPHDCLEILAETHGTRPDLTDQPIPDADHTWYTDGSSFLQEGQRKAGAAVTTETEVIWAGALPAGTSAQRAELIALTQALKMAEGKRLNVYTDSRYAFATAHIHGEIYRRRGWLTSEGREIKNKSEILALLKALFLPKRLSIIHCLGHQKGDSAEARGNRLADQAAREAAIKTPPDTSTLLIAGKRTADGSEFEKRTADGSEFESPKKKAKVE

SEQ ID NO: 7131 - protein, 2094 aa, synthetic construct; identical to SEQ ID NO: 7130

SEQ ID NO: 7132 - protein, 2094 aa, synthetic construct
MPAAKRVKLDGGDKKYSIGLDIGTNSVGWAVITDEYKVPSKKFKVLGNTDRHSIKKNLIGALLFDSGETAEATRLKRTARRRYTRRKNRICYLQEIFSNEMAKVDDSFFHRLEESFLVEEDKKHERHPIFGNIVDEVAYHEKYPTIYHLRKKLVDSTDKADLRLIYLALAHMIKFRGHFLIEGDLNPDNSDVDKLFIQLVQTYNQLFEENPINASGVDAKAILSARLSKSRRLENLIAQLPGEKKNGLFGNLIALSLGLTPNFKSNFDLAEDAKLQLSKDTYDDDLDNLLAQIGDQYADLFLAAKNLSDAILLSDILRVNTEITKAPLSASMIKRYDEHHQDLTLLKALVRQQLPEKYKEIFFDQSKNGYAGYIDGGASQEEFYKFIKPILEKMDGTEELLVKLNREDLLRKQRTFDNGSIPHQIHLGELHAILRRQEDFYPFLKDNREKIEKILTFRIPYYVGPLARGNSRFAWMTRKSEETITPWNFEEVVDKGASAQSFIERMTNFDKNLPNEKVLPKHSLLYEYFTVYNELTKVKYVTEGMRKPAFLSGEQKKAIVDLLFKTNRKVTVKQLKEDYFKKIECFDSVEISGVEDRFNASLGTYHDLLKIIKDKDFLDNEENEDILEDIVLTLTLFEDREMIEERLKTYAHLFDDKVMKQLKRRRYTGWGRLSRKLINGIRDKQSGKTILDFLKSDGFANRNFMQLIHDDSLTFKEDIQKAQVSGQGDSLHEHIANLAGSPAIKKGILQTVKVVDELVKVMGRHKPENIVIEMARENQTTQKGQKNSRERMKRIEEGIKELGSQILKEHPVENTQLQNEKLYLYYLQNGRDMYVDQELDINRLSDYDVDHIVPQSFLKDDSIDNKVLTRSDKARGKSDNVPSEEVVKKMKNYWRQLLNAKLITQRKFDNLTKAERGGLSELDKAGFIKRQLVETRQITKHVAQILDSRMNTKYDENDKLIREVKVITLKSKLVSDFRKDFQFYKVREINNYHHAHDAYLNAVVGTALIKKYPKLESEFVYGDYKVYDVRKMIAKSEQEIGKATAKYFFYSNIMNFFKTEITLANGEIRKRPLIETNGETGEIVWDKGRDFATVRKVLSMPQVNIVKKTEVQTGGFSKESILPKRNSDKLIARKKDWDPKKYGGFDSPTVAYSVLVVAKVEKGKSKKLKSVKELLGITIMERSSFEKNPIDFLEAKGYKEVKKDLIIKLPKYSLFELENGRKRMLASAGELQKGNELALPSKYVNFLYLASHYEKLKGSPEDNEQKQLFVEQHKHYLDEIIEQISEFSKRVILADANLDKVLSAYNKHRDKPIREQAENIIHLFTLTNLGAPAAFKYFDTTIDRKRYTSTKEVLDATLIHQSITGLYETRIDLSQLGGDGGGGSGSSPAPGGTLNIEDEYRLHETSKGPDVPLGSTWLSDFPQAWAETGGMGLAVRQAPLIIPLKATSTPVSIKQYPMSQEARLGIKPHIQRLLDQGILVPCQSPWNTPLLPVKKPGTNDYRPVQDLREVNKRVEDIHPTVPNPYNLLSGLPPSHQWYTVLDLKDAFFCLRLHPTSQSLFAFEWRDPEMGISGQLTWTRLPQGFKNSPTLFNEALHRDLADFRIQHPDLILLQYVDDLLLAATSELDCQQGTRALLQTLGDLGYRASAKKAQICQKQVKYLGYLLKEGQRWLTEARKETVMGQPTPKTPRQLREFLGTAGFCRLWIPGFAEMAAPLYPLTKPGTLFEWGPDQQKAYQEIKQALLTAPALGLPDLTKPFELFVDEKQGYAKGVLTQKLGPWRRPVAYLSKKLDPVAAGWPPCLRMVAAIAVLTKDAGKLTMGQPLVILAPHAVEALVKQPPDRWLSNARMTHYQALLLDTDRVQFGPIVALNPATLLPLPEEGLQHDCLDILAEAHGTRPDLTDQPLPDADHTWYTDGSSFLQEGQRKAGAAVTTETEVVWAKALPAGTSAQRAELIALTQALKMAEGKKLNVYTDSRYAFATAHIHGEIYRRRGWLTSEGKEIKNKDEILALLKALFLPKRLSIIHCPGHQKGNRAEARGNRMADQAAREVATRETPETSTLLAGKRTADGSEFEKRTADGSEFESPKKKAKVE

SEQ ID NO: 7133 - protein, 2094 aa, synthetic construct
MPAAKRVKLDGGDKKYSIGLDIGTNSVGWAVITDEYKVPSKKFKVLGNTDRHSIKKNLIGALLFDSGETAEATRLKRTARRRYTRRKNRICYLQEIFSNEMAKVDDSFFHRLEESFLVEEDKKHERHPIFGNIVDEVAYHEKYPTIYHLRKKLVDSTDKADLRLIYLALAHMIKFRGHFLIEGDLNPDNSDVDKLFIQLVQTYNQLFEENPINASGVDAKAILSARLSKSRRLENLIAQLPGEKKNGLFGNLIALSLGLTPNFKSNFDLAEDAKLQLSKDTYDDDLDNLLAQIGDQYADLFLAAKNLSDAILLSDILRVNTEITKAPLSASMIKRYDEHHQDLTLLKALVRQQLPEKYKEIFFDQSKNGYAGYIDGGASQEEFYKFIKPILEKMDGTEELLVKLNREDLLRKQRTFDNGSIPHQIHLGELHAILRRQEDFYPFLKDNREKIEKILTFRIPYYVGPLARGNSRFAWMTRKSEETITPWNFEEVVDKGASAQSFIERMTNFDKNLPNEKVLPKHSLLYEYFTVYNELTKVKYVTEGMRKPAFLSGEQKKAIVDLLFKTNRKVTVKQLKEDYFKKIECFDSVEISGVEDRFNASLGTYHDLLKIIKDKDFLDNEENEDILEDIVLTLTLFEDREMIEERLKTYAHLFDDKVMKQLKRRRYTGWGRLSRKLINGIRDKQSGKTILDFLKSDGFANRNFMQLIHDDSLTFKEDIQKAQVSGQGDSLHEHIANLAGSPAIKKGILQTVKVVDELVKVMGRHKPENIVIEMARENQTTQKGQKNSRERMKRIEEGIKELGSQILKEHPVENTQLQNEKLYLYYLQNGRDMYVDQELDINRLSDYDVDHIVPQSFLKDDSIDNKVLTRSDKARGKSDNVPSEEVVKKMKNYWRQLLNAKLITQRKFDNLTKAERGGLSELDKAGFIKRQLVETRQITKHVAQILDSRMNTKYDENDKLIREVKVITLKSKLVSDFRKDFQFYKVREINNYHHAHDAYLNAVVGTALIKKYPKLESEFVYGDYKVYDVRKMIAKSEQEIGKATAKYFFYSNIMNFFKTEITLANGEIRKRPLIETNGETGEIVWDKGRDFATVRKVLSMPQVNIVKKTEVQTGGFSKESILPKRNSDKLIARKKDWDPKKYGGFDSPTVAYSVLVVAKVEKGKSKKLKSVKELLGITIMERSSFEKNPIDFLEAKGYKEVKKDLIIKLPKYSLFELENGRKRMLASAGELQKGNELALPSKYVNFLYLASHYEKLKGSPEDNEQKQLFVEQHKHYLDEIIEQISEFSKRVILADANLDKVLSAYNKHRDKPIREQAENIIHLFTLTNLGAPAAFKYFDTTIDRKRYTSTKEVLDATLIHQSITGLYETRIDLSQLGGDGGGGSGSSPAPGGTLNIEDEYRLHEISTEPDVSPGSTWLSDFPQAWAETGGMGLAVRQAPLIIPLKATSTPVSIKQYPMSQEAKLGIKPHIQRLLDQGILVPCQSPWNTPLLPVKKPGTNDYRPVQGLREVNKRVEDIHPTVPNPYNLLSGLPTSHRWYTVLDLKDAFFCLRLHPTSQPLFASEWRDPGMGISGQLTWTRLPQGFKNSPTLFNEALHRGLADFRIQHPDLILLQYVDDLLLAATSELDCQQGTRALLKTLGNLGYRASAKKAQICQKQVKYLGYLLREGQRWLTEARKETVMGQPTPKTPRQLREFLGTAGFCRLWIPRFAEMAAPLYPLTKPGTLFNWGPDQQKAYHEIKQALLTAPALGLPDLTKPFELFVDEKQGYAKGVLTQKLGPWRRPVAYLSKKLDPVAAGWPPCLRMVAAIAVLTKDAGKLTMGQPLVILAPHAVEALVKQPPDRWLSNARMTHYQAMLLDTDRVQFGPVVALNPATLLPLPEEGAPHDCLEILAETHGTEPDLTDQPIPDADHTWYTDGSSFLQEGQRKAGAAVTTETEVIWARALPAGTSAQRAELIALTQALKMAEGKRLNVYTDSRYAFATAHIHGEIYKRRGWLTSEGREIKNKSEILALLKALFLPKRLSIIHCLGHQKGDSAEARGNRLADQAAREAAIKTPPDTSTLLAGKRTADGSEFEKRTADGSEFESPKKKAKVE

SEQ ID NO: 7134 - protein, 2088 aa, synthetic construct
MPAAKRVKLDGGDKKYSIGLDIGTNSVGWAVITDEYKVPSKKFKVLGNTDRHSIKKNLIGALLFDSGETAEATRLKRTARRRYTRRKNRICYLQEIFSNEMAKVDDSFFHRLEESFLVEEDKKHERHPIFGNIVDEVAYHEKYPTIYHLRKKLVDSTDKADLRLIYLALAHMIKFRGHFLIEGDLNPDNSDVDKLFIQLVQTYNQLFEENPINASGVDAKAILSARLSKSRRLENLIAQLPGEKKNGLFGNLIALSLGLTPNFKSNFDLAEDAKLQLSKDTYDDDLDNLLAQIGDQYADLFLAAKNLSDAILLSDILRVNTEITKAPLSASMIKRYDEHHQDLTLLKALVRQQLPEKYKEIFFDQSKNGYAGYIDGGASQEEFYKFIKPILEKMDGTEELLVKLNREDLLRKQRTFDNGSIPHQIHLGELHAILRRQEDFYPFLKDNREKIEKILTFRIPYYVGPLARGNSRFAWMTRKSEETITPWNFEEVVDKGASAQSFIERMTNFDKNLPNEKVLPKHSLLYEYFTVYNELTKVKYVTEGMRKPAFLSGEQKKAIVDLLFKTNRKVTVKQLKEDYFKKIECFDSVEISGVEDRFNASLGTYHDLLKIIKDKDFLDNEENEDILEDIVLTLTLFEDREMIEERLKTYAHLFDDKVMKQLKRRRYTGWGRLSRKLINGIRDKQSGKTILDFLKSDGFANRNFMQLIHDDSLTFKEDIQKAQVSGQGDSLHEHIANLAGSPAIKKGILQTVKVVDELVKVMGRHKPENIVIEMARENQTTQKGQKNSRERMKRIEEGIKELGSQILKEHPVENTQLQNEKLYLYYLQNGRDMYVDQELDINRLSDYDVDHIVPQSFLKDDSIDNKVLTRSDKARGKSDNVPSEEVVKKMKNYWRQLLNAKLITQRKFDNLTKAERGGLSELDKAGFIKRQLVETRQITKHVAQILDSRMNTKYDENDKLIREVKVITLKSKLVSDFRKDFQFYKVREINNYHHAHDAYLNAVVGTALIKKYPKLESEFVYGDYKVYDVRKMIAKSEQEIGKATAKYFFYSNIMNFFKTEITLANGEIRKRPLIETNGETGEIVWDKGRDFATVRKVLSMPQVNIVKKTEVQTGGFSKESILPKRNSDKLIARKKDWDPKKYGGFDSPTVAYSVLVVAKVEKGKSKKLKSVKELLGITIMERSSFEKNPIDFLEAKGYKEVKKDLIIKLPKYSLFELENGRKRMLASAGELQKGNELALPSKYVNFLYLASHYEKLKGSPEDNEQKQLFVEQHKHYLDEIIEQISEFSKRVILADANLDKVLSAYNKHRDKPIREQAENIIHLFTLTNLGAPAAFKYFDTTIDRKRYTSTKEVLDATLIHQSITGLYETRIDLSQLGGDGGGGSGSSPAPGGTLQLDDEYRLYSPLVKPDQNIQFWLEQFPQAWAETAGMGLAKQVPPQVIQLKASATPVSVRQYPLSKEAQEGIRPHVQRLIQQGILVPVQSPWNTPLLPVRKPGTNDYRPVQDLREVNKRVQDIHPTVPNPYNLLCALPPQRSWYTVLDLKDAFFCLRLHPTSQPLFAFEWRDPGTGRTGQLTWTRLPQGFKNSPTIFDEALHRDLANFRIQHPQVTLLQYVDDLLLAGATKQDCLEGTKALLLELSDLGYRASAKKAQICRREVTYLGYSLRDGQRWLTEARKKTVVQIPAPTTAKQVREFLGTAGFCRLWIPGFATLAAPLYPLTKEKGEFSWAPEHQKAFDAIKKALLSAPALALPDVTKPFTLYVDERKGVARGVLTQTLGPWRRPVAYLSKKLDPVASGWPVCLKAIAAVAILVKDADKLTLGQNITVIAPHALENIVRQPPDRWMTNARMTHYQSLLLTERVTFAPPAALNPATLLPEETDEPVTHDCHQLLIEETGVRKDLTDIPLTGEVLTWFTDGSSYVVEGKRMAGAAVVDGTRTIWASSLPEGTSAQKAELMALTQALRLAEGKSINIYTDSRYAFATAHVHGAIYKQRGLLTSAGREIKNKEEILSLLEALHLPKRLAIIHCPGHQKAKDPISRGNQMADRVAKQAAQGVNLLAGKRTADGSEFEKRTADGSEFESPKKKAKVE

SEQ ID NO: 7135 - protein, 2092 aa, synthetic construct
MPAAKRVKLDGGDKKYSIGLDIGTNSVGWAVITDEYKVPSKKFKVLGNTDRHSIKKNLIGALLFDSGETAEATRLKRTARRRYTRRKNRICYLQEIFSNEMAKVDDSFFHRLEESFLVEEDKKHERHPIFGNIVDEVAYHEKYPTIYHLRKKLVDSTDKADLRLIYLALAHMIKFRGHFLIEGDLNPDNSDVDKLFIQLVQTYNQLFEENPINASGVDAKAILSARLSKSRRLENLIAQLPGEKKNGLFGNLIALSLGLTPNFKSNFDLAEDAKLQLSKDTYDDDLDNLLAQIGDQYADLFLAAKNLSDAILLSDILRVNTEITKAPLSASMIKRYDEHHQDLTLLKALVRQQLPEKYKEIFFDQSKNGYAGYIDGGASQEEFYKFIKPILEKMDGTEELLVKLNREDLLRKQRTFDNGSIPHQIHLGELHAILRRQEDFYPFLKDNREKIEKILTFRIPYYVGPLARGNSRFAWMTRKSEETITPWNFEEVVDKGASAQSFIERMTNFDKNLPNEKVLPKHSLLYEYFTVYNELTKVKYVTEGMRKPAFLSGEQKKAIVDLLFKTNRKVTVKQLKEDYFKKIECFDSVEISGVEDRFNASLGTYHDLLKIIKDKDFLDNEENEDILEDIVLTLTLFEDREMIEERLKTYAHLFDDKVMKQLKRRRYTGWGRLSRKLINGIRDKQSGKTILDFLKSDGFANRNFMQLIHDDSLTFKEDIQKAQVSGQGDSLHEHIANLAGSPAIKKGILQTVKVVDELVKVMGRHKPENIVIEMARENQTTQKGQKNSRERMKRIEEGIKELGSQILKEHPVENTQLQNEKLYLYYLQNGRDMYVDQELDINRLSDYDVDHIVPQSFLKDDSIDNKVLTRSDKARGKSDNVPSEEVVKKMKNYWRQLLNAKLITQRKFDNLTKAERGGLSELDKAGFIKRQLVETRQITKHVAQILDSRMNTKYDENDKLIREVKVITLKSKLVSDFRKDFQFYKVREINNYHHAHDAYLNAVVGTALIKKYPKLESEFVYGDYKVYDVRKMIAKSEQEIGKATAKYFFYSNIMNFFKTEITLANGEIRKRPLIETNGETGEIVWDKGRDFATVRKVLSMPQVNIVKKTEVQTGGFSKESILPKRNSDKLIARKKDWDPKKYGGFDSPTVAYSVLVVAKVEKGKSKKLKSVKELLGITIMERSSFEKNPIDFLEAKGYKEVKKDLIIKLPKYSLFELENGRKRMLASAGELQKGNELALPSKYVNFLYLASHYEKLKGSPEDNEQKQLFVEQHKHYLDEIIEQISEFSKRVILADANLDKVLSAYNKHRDKPIREQAENIIHLFTLTNLGAPAAFKYFDTTIDRKRYTSTKEVLDATLIHQSITGLYETRIDLSQLGGDGGGGSGSSPAPGGVLNLEEEYRLHEKPVPSSIDPSWLQLFPTVWAERAGMGLANQVPPVVVELRSGASPVAVRQYPMSKEAREGIRPHIQRFLDLGVLVPCQSPWNTPLLPVKKPGTNDYRPVQDLREINKRVQDIHPTVPNPYNLLSSLPPSHTWYSVLDLKDAFFCLKLHPNSQPLFAFEWRDPEKGNTGQLTWTRLPQGFKNSPTLFNEALHRDLAPFRALNPQVVLLQYVDDLLVAAPTYRDCKEGTQKLLQELSKLGYRVSAKKAQLCQKEVTYLGYLLKEGKRWLTPARKATVMKIPPPTTPRQVREFLGTAGFCRLWIPGFASLAAPLYPLTKPSIPFIWTEEHQKAFDRIKEALLSAPALALPDLTKPFTLYVDERAGVARGVLTQTLGPWRRPVAYLSKKLDPVASGWPTCLKAVAAVALLLKDADKLTLGQNVTVIASHSLESIVRQPPDRWMTNARMTHYQSLLLNERVSFAPPAVLNPATLLPVESEATPVHRCSEILAEETGTRRDLKDQPLPGVPAWYTDGSSFIAEGKRRAGAAIVDGKRTVWASSLPEGTSAQKAELVALTQALRLAEGKDINIYTDSRYAFATAHIHGAIYKQRGWLTSAGKDIKNKEEILALLEAIHLPKRVAIIHCPGHQKGNDPVATGNRRADEAAKQAALSTRVLAETTKPAGKRTADGSEFEKRTADGSEFESPKKKAKVE

SEQ ID NO: 7136 - protein, 2094 aa, synthetic construct
MPAAKRVKLDGGDKKYSIGLDIGTNSVGWAVITDEYKVPSKKFKVLGNTDRHSIKKNLIGALLFDSGETAEATRLKRTARRRYTRRKNRICYLQEIFSNEMAKVDDSFFHRLEESFLVEEDKKHERHPIFGNIVDEVAYHEKYPTIYHLRKKLVDSTDKADLRLIYLALAHMIKFRGHFLIEGDLNPDNSDVDKLFIQLVQTYNQLFEENPINASGVDAKAILSARLSKSRRLENLIAQLPGEKKNGLFGNLIALSLGLTPNFKSNFDLAEDAKLQLSKDTYDDDLDNLLAQIGDQYADLFLAAKNLSDAILLSDILRVNTEITKAPLSASMIKRYDEHHQDLTLLKALVRQQLPEKYKEIFFDQSKNGYAGYIDGGASQEEFYKFIKPILEKMDGTEELLVKLNREDLLRKQRTFDNGSIPHQIHLGELHAILRRQEDFYPFLKDNREKIEKILTFRIPYYVGPLARGNSRFAWMTRKSEETITPWNFEEVVDKGASAQSFIERMTNFDKNLPNEKVLPKHSLLYEYFTVYNELTKVKYVTEGMRKPAFLSGEQKKAIVDLLFKTNRKVTVKQLKEDYFKKIECFDSVEISGVEDRFNASLGTYHDLLKIIKDKDFLDNEENEDILEDIVLTLTLFEDREMIEERLKTYAHLFDDKVMKQLKRRRYTGWGRLSRKLINGIRDKQSGKTILDFLKSDGFANRNFMQLIHDDSLTFKEDIQKAQVSGQGDSLHEHIANLAGSPAIKKGILQTVKVVDELVKVMGRHKPENIVIEMARENQTTQKGQKNSRERMKRIEEGIKELGSQILKEHPVENTQLQNEKLYLYYLQNGRDMYVDQELDINRLSDYDVDHIVPQSFLKDDSIDNKVLTRSDKARGKSDNVPSEEVVKKMKNYWRQLLNAKLITQRKFDNLTKAERGGLSELDKAGFIKRQLVETRQITKHVAQILDSRMNTKYDENDKLIREVKVITLKSKLVSDFRKDFQFYKVREINNYHHAHDAYLNAVVGTALIKKYPKLESEFVYGDYKVYDVRKMIAKSEQEIGKATAKYFFYSNIMNFFKTEITLANGEIRKRPLIETNGETGEIVWDKGRDFATVRKVLSMPQVNIVKKTEVQTGGFSKESILPKRNSDKLIARKKDWDPKKYGGFDSPTVAYSVLVVAKVEKGKSKKLKSVKELLGITIMERSSFEKNPIDFLEAKGYKEVKKDLIIKLPKYSLFELENGRKRMLASAGELQKGNELALPSKYVNFLYLASHYEKLKGSPEDNEQKQLFVEQHKHYLDEIIEQISEFSKRVILADANLDKVLSAYNKHRDKPIREQAENIIHLFTLTNLGAPAAFKYFDTTIDRKRYTSTKEVLDATLIHQSITGLYETRIDLSQLGGDGGGGSGSSPAPGGTLNIEDEYRLHETSKEPDVPLGSTWLSDFPQAWAETGGMGLAVRQAPLIIPLKATSTPVSIKQYPMSQEARLGIKPHIQRLLDQGILVPCQSPWNTPLLPVKKPGTNDYRPVQDLREVNKRVEDIHPTVPNPYNLLSGLPPSHQWYTVLDLKDAFFCLRLHPTSQPLFAFEWRDPEMGISGQLTWTRLPQGFKNSPTLFDEALHRDLADFRIQHPDLILLQYVDDLLLAATSEQDCQRGTRALLQTLGNLGYRASAKKAQICQKQVKYLGYLLKEGQRWLTEARKETVMGQPTPKTPRQLREFLGTAGFCRLWIPGFAEMAAPLYPLTKTGTLFNWGPDQQKAYQEIKQALLTAPALGLPDLTKPFELFVDEKQGYAKGVLTQKLGPWRRPVAYLSKKLDPVAAGWPPCLRMVAAIAVLTKDAGKLTMGQPLVILAPHAVEALVKQPPDRWLSNARMTHYQAMLLDTDRVQFGPVVALNPATLLPLPEKEAPHDCLEILAETHGTRPDLTDQPIPDADYTWYTDGSSFLQEGQRRAGAAVTTETEVIWARALPAGTSAQRAELIALTQALKMAEGKKLNVYTDSRYAFATAHVHGEIYRRRGLLTSEGREIKNKNEILALLKALFLPKRLSIIHCPGHQKGNSAEARGNRMADQAAREAAMKAVLETSTLLAGKRTADGSEFEKRTADGSEFESPKKKAKVE

SEQ ID NO: 7137 - protein, 2094 aa, synthetic construct
MPAAKRVKLDGGDKKYSIGLDIGTNSVGWAVITDEYKVPSKKFKVLGNTDRHSIKKNLIGALLFDSGETAEATRLKRTARRRYTRRKNRICYLQEIFSNEMAKVDDSFFHRLEESFLVEEDKKHERHPIFGNIVDEVAYHEKYPTIYHLRKKLVDSTDKADLRLIYLALAHMIKFRGHFLIEGDLNPDNSDVDKLFIQLVQTYNQLFEENPINASGVDAKAILSARLSKSRRLENLIAQLPGEKKNGLFGNLIALSLGLTPNFKSNFDLAEDAKLQLSKDTYDDDLDNLLAQIGDQYADLFLAAKNLSDAILLSDILRVNTEITKAPLSASMIKRYDEHHQDLTLLKALVRQQLPEKYKEIFFDQSKNGYAGYIDGGASQEEFYKFIKPILEKMDGTEELLVKLNREDLLRKQRTFDNGSIPHQIHLGELHAILRRQEDFYPFLKDNREKIEKILTFRIPYYVGPLARGNSRFAWMTRKSEETITPWNFEEVVDKGASAQSFIERMTNFDKNLPNEKVLPKHSLLYEYFTVYNELTKVKYVTEGMRKPAFLSGEQKKAIVDLLFKTNRKVTVKQLKEDYFKKIECFDSVEISGVEDRFNASLGTYHDLLKIIKDKDFLDNEENEDILEDIVLTLTLFEDREMIEERLKTYAHLFDDKVMKQLKRRRYTGWGRLSRKLINGIRDKQSGKTILDFLKSDGFANRNFMQLIHDDSLTFKEDIQKAQVSGQGDSLHEHIANLAGSPAIKKGILQTVKVVDELVKVMGRHKPENIVIEMARENQTTQKGQKNSRERMKRIEEGIKELGSQILKEHPVENTQLQNEKLYLYYLQNGRDMYVDQELDINRLSDYDVDHIVPQSFLKDDSIDNKVLTRSDKARGKSDNVPSEEVVKKMKNYWRQLLNAKLITQRKFDNLTKAERGGLSELDKAGFIKRQLVETRQITKHVAQILDSRMNTKYDENDKLIREVKVITLKSKLVSDFRKDFQFYKVREINNYHHAHDAYLNAVVGTALIKKYPKLESEFVYGDYKVYDVRKMIAKSEQEIGKATAKYFFYSNIMNFFKTEITLANGEIRKRPLIETNGETGEIVWDKGRDFATVRKVLSMPQVNIVKKTEVQTGGFSKESILPKRNSDKLIARKKDWDPKKYGGFDSPTVAYSVLVVAKVEKGKSKKLKSVKELLGITIMERSSFEKNPIDFLEAKGYKEVKKDLIIKLPKYSLFELENGRKRMLASAGELQKGNELALPSKYVNFLYLASHYEKLKGSPEDNEQKQLFVEQHKHYLDEIIEQISEFSKRVILADANLDKVLSAYNKHRDKPIREQAENIIHLFTLTNLGAPAAFKYFDTTIDRKRYTSTKEVLDATLIHQSITGLYETRIDLSQLGGDGGGGSGSSPAPGGTLNIEDEYRLHETSKEPDVPLGSTWLSDFPQAWAETGGMGLAVRQAPLIIPLKATSTPVSIKQYPMSQEARLGIKPHIQRLLDQGILVPCQSPWNTPLLPVKKPGTNDYRPVQDLREVNKRVEDIHPTVPNPYNLLSGLPPSHQWYTVLDLKDAFFCLRLHPTSQPLFAFEWRDPEMGISGQLTWTRLPQGFKNSPTLFNEALHRDLADFRIQHPDLILLQYVDDLLLAATSEQDCQRGTRALLQTLGNLGYRASAKKAQICQKQVKYLGYLLKEGQRWLTEARKETVMGQPTPKTPRQLREFLGTAGFCRLWIPGFAEMAAPLYPLTKPGTLFNWGPDQQKAYQEIKQALLTAPALGLPDLTKPFELFVDEKQGYAKGVLTQKLGPWRRPVAYLSKKLDPVAAGWPPCLRMVAAIAVLTKDAGKLTMGQPLVILAPHAVEALVKQPPDRWLSNARMTHYQAMLLDTDRVQFGPVVALNPATLLPLPEKEAPHDCLEILAETHGTRPDLTDQPIPDADYTWYTDGSSFLQEGQRRAGAAVTTETEVIWARALPAGTSAQRAELIALTQALKMAEGKKLNVYTDSRYAFATAHVHGEIYRRRGWLTSEGREIKNKNEILALLKALFLPKRLSIIHCPGHQKGNSAEARGNRMADQAAREAAMKAVLETSTLLAGKRTADGSEFEKRTADGSEFESPKKKAKVE

SEQ ID NO: 7138 - protein, 2093 aa, synthetic construct
MPAAKRVKLDGGDKKYSIGLDIGTNSVGWAVITDEYKVPSKKFKVLGNTDRHSIKKNLIGALLFDSGETAEATRLKRTARRRYTRRKNRICYLQEIFSNEMAKVDDSFFHRLEESFLVEEDKKHERHPIFGNIVDEVAYHEKYPTIYHLRKKLVDSTDKADLRLIYLALAHMIKFRGHFLIEGDLNPDNSDVDKLFIQLVQTYNQLFEENPINASGVDAKAILSARLSKSRRLENLIAQLPGEKKNGLFGNLIALSLGLTPNFKSNFDLAEDAKLQLSKDTYDDDLDNLLAQIGDQYADLFLAAKNLSDAILLSDILRVNTEITKAPLSASMIKRYDEHHQDLTLLKALVRQQLPEKYKEIFFDQSKNGYAGYIDGGASQEEFYKFIKPILEKMDGTEELLVKLNREDLLRKQRTFDNGSIPHQIHLGELHAILRRQEDFYPFLKDNREKIEKILTFRIPYYVGPLARGNSRFAWMTRKSEETITPWNFEEVVDKGASAQSFIERMTNFDKNLPNEKVLPKHSLLYEYFTVYNELTKVKYVTEGMRKPAFLSGEQKKAIVDLLFKTNRKVTVKQLKEDYFKKIECFDSVEISGVEDRFNASLGTYHDLLKIIKDKDFLDNEENEDILEDIVLTLTLFEDREMIEERLKTYAHLFDDKVMKQLKRRRYTGWGRLSRKLINGIRDKQSGKTILDFLKSDGFANRNFMQLIHDDSLTFKEDIQKAQVSGQGDSLHEHIANLAGSPAIKKGILQTVKVVDELVKVMGRHKPENIVIEMARENQTTQKGQKNSRERMKRIEEGIKELGSQILKEHPVENTQLQNEKLYLYYLQNGRDMYVDQELDINRLSDYDVDHIVPQSFLKDDSIDNKVLTRSDKARGKSDNVPSEEVVKKMKNYWRQLLNAKLITQRKFDNLTKAERGGLSELDKAGFIKRQLVETRQITKHVAQILDSRMNTKYDENDKLIREVKVITLKSKLVSDFRKDFQFYKVREINNYHHAHDAYLNAVVGTALIKKYPKLESEFVYGDYKVYDVRKMIAKSEQEIGKATAKYFFYSNIMNFFKTEITLANGEIRKRPLIETNGETGEIVWDKGRDFATVRKVLSMPQVNIVKKTEVQTGGFSKESILPKRNSDKLIARKKDWDPKKYGGFDSPTVAYSVLVVAKVEKGKSKKLKSVKELLGITIMERSSFEKNPIDFLEAKGYKEVKKDLIIKLPKYSLFELENGRKRMLASAGELQKGNELALPSKYVNFLYLASHYEKLKGSPEDNEQKQLFVEQHKHYLDEIIEQISEFSKRVILADANLDKVLSAYNKHRDKPIREQAENIIHLFTLTNLGAPAAFKYFDTTIDRKRYTSTKEVLDATLIHQSITGLYETRIDLSQLGGDGGGGSPAPGSSGGTLQLEEEYRLFEPESTQKQEMDIWLKNFPQAWAETGGMGTAHCQAPVLIQLKATATPISIRQYPMPHEAYQGIKPHIRRMLDQGILKPCQSPWNTPLLPVKKPGTEDYRPVQDLREVNKRVEDIHPTVPNPYNLLSTLPPSHPWYTVLDLKDAFFCLRLHSESQLLFAFEWRDPEIGLSGQLTWTRLPQGFKNSPTLFNEALHSDLADFRVRYPALVLLQYVDDLLLAAATRTECLEGTKALLETLGNKGYRASAKKAQICLQEVTYLGYSLKDGQRWLTKARKEAILSIPVPKNSRQVREFLGTAGYCRLWIPGFAELAAPLYPLTRPGTLFQWGTEQQLAFEDIKKALLSSPALGLPDITKPFELFIDENSGFAKGVLVQKLGPWKRPVAYLSKKLDTVASGWPPCLRMVAAIAILVKDAGKLTLGQPLTILTSHPVEALVRQPPNKWLSNARMTHYQAMLLDAERVHFGPTVSLNPATLLPLPSGGNHHDCLQILAETHGTRPDLTDQPLPDADLTWYTDGSSFIRNGEREAGAAVTTESEVIWAAPLPPGTSAQRAELIALTQALKMAEGKKLTVYTDSRYAFATTHVHGEIYRRRGWLTSEGKEIKNKNEILALLEALFLPKRLSIIHCPGHQKGDSPQAKGNRLADDTAKKAATETHSSLTVLPAGKRTADGSEFEKRTADGSEFESPKKKAKVE

SEQ ID NO: 7139 - protein, 2094 aa, synthetic construct
MPAAKRVKLDGGDKKYSIGLDIGTNSVGWAVITDEYKVPSKKFKVLGNTDRHSIKKNLIGALLFDSGETAEATRLKRTARRRYTRRKNRICYLQEIFSNEMAKVDDSFFHRLEESFLVEEDKKHERHPIFGNIVDEVAYHEKYPTIYHLRKKLVDSTDKADLRLIYLALAHMIKFRGHFLIEGDLNPDNSDVDKLFIQLVQTYNQLFEENPINASGVDAKAILSARLSKSRRLENLIAQLPGEKKNGLFGNLIALSLGLTPNFKSNFDLAEDAKLQLSKDTYDDDLDNLLAQIGDQYADLFLAAKNLSDAILLSDILRVNTEITKAPLSASMIKRYDEHHQDLTLLKALVRQQLPEKYKEIFFDQSKNGYAGYIDGGASQEEFYKFIKPILEKMDGTEELLVKLNREDLLRKQRTFDNGSIPHQIHLGELHAILRRQEDFYPFLKDNREKIEKILTFRIPYYVGPLARGNSRFAWMTRKSEETITPWNFEEVVDKGASAQSFIERMTNFDKNLPNEKVLPKHSLLYEYFTVYNELTKVKYVTEGMRKPAFLSGEQKKAIVDLLFKTNRKVTVKQLKEDYFKKIECFDSVEISGVEDRFNASLGTYHDLLKIIKDKDFLDNEENEDILEDIVLTLTLFEDREMIEERLKTYAHLFDDKVMKQLKRRRYTGWGRLSRKLINGIRDKQSGKTILDFLKSDGFANRNFMQLIHDDSLTFKEDIQKAQVSGQGDSLHEHIANLAGSPAIKKGILQTVKVVDELVKVMGRHKPENIVIEMARENQTTQKGQKNSRERMKRIEEGIKELGSQILKEHPVENTQLQNEKLYLYYLQNGRDMYVDQELDINRLSDYDVDHIVPQSFLKDDSIDNKVLTRSDKARGKSDNVPSEEVVKKMKNYWRQLLNAKLITQRKFDNLTKAERGGLSELDKAGFIKRQLVETRQITKHVAQILDSRMNTKYDENDKLIREVKVITLKSKLVSDFRKDFQFYKVREINNYHHAHDAYLNAVVGTALIKKYPKLESEFVYGDYKVYDVRKMIAKSEQEIGKATAKYFFYSNIMNFFKTEITLANGEIRKRPLIETNGETGEIVWDKGRDFATVRKVLSMPQVNIVKKTEVQTGGFSKESILPKRNSDKLIARKKDWDPKKYGGFDSPTVAYSVLVVAKVEKGKSKKLKSVKELLGITIMERSSFEKNPIDFLEAKGYKEVKKDLIIKLPKYSLFELENGRKRMLASAGELQKGNELALPSKYVNFLYLASHYEKLKGSPEDNEQKQLFVEQHKHYLDEIIEQISEFSKRVILADANLDKVLSAYNKHRDKPIREQAENIIHLFTLTNLGAPAAFKYFDTTIDRKRYTSTKEVLDATLIHQSITGLYETRIDLSQLGGDGGGGSPAPGSSGGTLNLEDEYRLYETSAEPEVSPGSTWLSDFPQAWAETGGMGLAVRQAPLIIPLKATSTPVSIKQYPMSQEAKLGIKPHIQRLLDQGILVPCQSPWNTPLLPVKKPGTNDYRPVQDLREVNKRVEDIHPTVPNPYNLLSGLPPSHRWYTVLDLKDAFFCLRLHPTSQPLFAFEWRDPGMGISGQLTWTRLPQGFKNSPTLFNEALHRDLADFRIQHPDLILLQYVDDILLAATSELDCQQGTRALLLTLGNLGYRASAKKAQLCQKQVKYLGYLLKEGQRWLTEARKETVMGQPTPKTPRQLREFLGTAGFCRLWIPGFAEMAAPLYPLTKPGTLFNWGPDQQKAYQEIKQALLTAPALGLPDLTKPFELFVDEKQGYAKGVLTQKLGPWRRPVAYLSKKLDPVAAGWPPCLRMVAAIAVLRKDAGKLTMGQPLVILAPHAVEALVKQPPDRWLSNARMTHYQAMLLDTDRVQFGPVVALNPATLLPLPEEGAPHDCLEILAETHGTRPDLTDQPIPDADHTWYTDGSSFLQEGQRKAGAAVTTETEVIWARALPAGTSAQRAELIALTQALKMAEGKRLNVYTDSRYAFATAHIHGEIYRRRGWLTSEGREIKNKSEILALLKALFLPKRLSIIHCLGHQKGDSAEARGNRLADQAAREAAIKTPPDTSTLLAGKRTADGSEFEKRTADGSEFESPKKKAKVE

SEQ ID NO: 7140 - protein, 2094 aa, synthetic construct
MPAAKRVKLDGGDKKYSIGLDIGTNSVGWAVITDEYKVPSKKFKVLGNTDRHSIKKNLIGALLFDSGETAEATRLKRTARRRYTRRKNRICYLQEIFSNEMAKVDDSFFHRLEESFLVEEDKKHERHPIFGNIVDEVAYHEKYPTIYHLRKKLVDSTDKADLRLIYLALAHMIKFRGHFLIEGDLNPDNSDVDKLFIQLVQTYNQLFEENPINASGVDAKAILSARLSKSRRLENLIAQLPGEKKNGLFGNLIALSLGLTPNFKSNFDLAEDAKLQLSKDTYDDDLDNLLAQIGDQYADLFLAAKNLSDAILLSDILRVNTEITKAPLSASMIKRYDEHHQDLTLLKALVRQQLPEKYKEIFFDQSKNGYAGYIDGGASQEEFYKFIKPILEKMDGTEELLVKLNREDLLRKQRTFDNGSIPHQIHLGELHAILRRQEDFYPFLKDNREKIEKILTFRIPYYVGPLARGNSRFAWMTRKSEETITPWNFEEVVDKGASAQSFIERMTNFDKNLPNEKVLPKHSLLYEYFTVYNELTKVKYVTEGMRKPAFLSGEQKKAIVDLLFKTNRKVTVKQLKEDYFKKIECFDSVEISGVEDRFNASLGTYHDLLKIIKDKDFLDNEENEDILEDIVLTLTLFEDREMIEERLKTYAHLFDDKVMKQLKRRRYTGWGRLSRKLINGIRDKQSGKTILDFLKSDGFANRNFMQLIHDDSLTFKEDIQKAQVSGQGDSLHEHIANLAGSPAIKKGILQTVKVVDELVKVMGRHKPENIVIEMARENQTTQKGQKNSRERMKRIEEGIKELGSQILKEHPVENTQLQNEKLYLYYLQNGRDMYVDQELDINRLSDYDVDHIVPQSFLKDDSIDNKVLTRSDKARGKSDNVPSEEVVKKMKNYWRQLLNAKLITQRKFDNLTKAERGGLSELDKAGFIKRQLVETRQITKHVAQILDSRMNTKYDENDKLIREVKVITLKSKLVSDFRKDFQFYKVREINNYHHAHDAYLNAVVGTALIKKYPKLESEFVYGDYKVYDVRKMIAKSEQEIGKATAKYFFYSNIMNFFKTEITLANGEIRKRPLIETNGETGEIVWDKGRDFATVRKVLSMPQVNIVKKTEVQTGGFSKESILPKRNSDKLIARKKDWDPKKYGGFDSPTVAYSVLVVAKVEKGKSKKLKSVKELLGITIMERSSFEKNPIDFLEAKGYKEVKKDLIIKLPKYSLFELENGRKRMLASAGELQKGNELALPSKYVNFLYLASHYEKLKGSPEDNEQKQLFVEQHKHYLDEIIEQISEFSKRVILADANLDKVLSAYNKHRDKPIREQAENIIHLFTLTNLGAPAAFKYFDTTIDRKRYTSTKEVLDATLIHQSITGLYETRIDLSQLGGDGGGGSPAPGSSGGTLNIEDEYRLHETSKGPDVPLGSTWLSDFPQAWAETGGMGLAVRQAPLIIPLKATSTPVSIKQYPMSQEARLGIKPHIQRLLDQGILVPCQSPWNTPLLPVKKPGTNDYRPVQDLREVNKRVEDIHPTVPNPYNLLSGLPPSHQWYTVLDLKDAFFCLRLHPTSQSLFAFEWRDPEMGISGQLTWTRLPQGFKNSPTLFNEALHRDLADFRIQHPDLILLQYVDDLLLAATSELDCQQGTRALLQTLGDLGYRASAKKAQICQKQVKYLGYLLKEGQRWLTEARKETVMGQPTPKTPRQLREFLGTAGFCRLWIPGFAEMAAPLYPLTKPGTLFEWGPDQQKAYQEIKQALLTAPALGLPDLTKPFELFVDEKQGYAKGVLTQKLGPWRRPVAYLSKKLDPVAAGWPPCLRMVAAIAVLTKDAGKLTMGQPLVILAPHAVEALVKQPPDRWLSNARMTHYQALLLDTDRVQFGPIVALNPATLLPLPEEGLQHDCLDILAEAHGTRPDLTDQPLPDADHTWYTDGSSFLQEGQRKAGAAVTTETEVVWAKALPAGTSAQRAELIALTQALKMAEGKKLNVYTDSRYAFATAHIHGEIYRRRGWLTSEGKEIKNKDEILALLKALFLPKRLSIIHCPGHQKGNRAEARGNRMADQAAREVATRETPETSTLLAGKRTADGSEFEKRTADGSEFESPKKKAKVE

SEQ ID NO: 7141 - protein, 2092 aa, synthetic construct
MPAAKRVKLDGGDKKYSIGLDIGTNSVGWAVITDEYKVPSKKFKVLGNTDRHSIKKNLIGALLFDSGETAEATRLKRTARRRYTRRKNRICYLQEIFSNEMAKVDDSFFHRLEESFLVEEDKKHERHPIFGNIVDEVAYHEKYPTIYHLRKKLVDSTDKADLRLIYLALAHMIKFRGHFLIEGDLNPDNSDVDKLFIQLVQTYNQLFEENPINASGVDAKAILSARLSKSRRLENLIAQLPGEKKNGLFGNLIALSLGLTPNFKSNFDLAEDAKLQLSKDTYDDDLDNLLAQIGDQYADLFLAAKNLSDAILLSDILRVNTEITKAPLSASMIKRYDEHHQDLTLLKALVRQQLPEKYKEIFFDQSKNGYAGYIDGGASQEEFYKFIKPILEKMDGTEELLVKLNREDLLRKQRTFDNGSIPHQIHLGELHAILRRQEDFYPFLKDNREKIEKILTFRIPYYVGPLARGNSRFAWMTRKSEETITPWNFEEVVDKGASAQSFIERMTNFDKNLPNEKVLPKHSLLYEYFTVYNELTKVKYVTEGMRKPAFLSGEQKKAIVDLLFKTNRKVTVKQLKEDYFKKIECFDSVEISGVEDRFNASLGTYHDLLKIIKDKDFLDNEENEDILEDIVLTLTLFEDREMIEERLKTYAHLFDDKVMKQLKRRRYTGWGRLSRKLINGIRDKQSGKTILDFLKSDGFANRNFMQLIHDDSLTFKEDIQKAQVSGQGDSLHEHIANLAGSPAIKKGILQTVKVVDELVKVMGRHKPENIVIEMARENQTTQKGQKNSRERMKRIEEGIKELGSQILKEHPVENTQLQNEKLYLYYLQNGRDMYVDQELDINRLSDYDVDHIVPQSFLKDDSIDNKVLTRSDKARGKSDNVPSEEVVKKMKNYWRQLLNAKLITQRKFDNLTKAERGGLSELDKAGFIKRQLVETRQITKHVAQILDSRMNTKYDENDKLIREVKVITLKSKLVSDFRKDFQFYKVREINNYHHAHDAYLNAVVGTALIKKYPKLESEFVYGDYKVYDVRKMIAKSEQEIGKATAKYFFYSNIMNFFKTEITLANGEIRKRPLIETNGETGEIVWDKGRDFATVRKVLSMPQVNIVKKTEVQTGGFSKESILPKRNSDKLIARKKDWDPKKYGGFDSPTVAYSVLVVAKVEKGKSKKLKSVKELLGITIMERSSFEKNPIDFLEAKGYKEVKKDLIIKLPKYSLFELENGRKRMLASAGELQKGNELALPSKYVNFLYLASHYEKLKGSPEDNEQKQLFVEQHKHYLDEIIEQISEFSKRVILADANLDKVLSAYNKHRDKPIREQAENIIHLFTLTNLGAPAAFKYFDTTIDRKRYTSTKEVLDATLIHQSITGLYETRIDLSQLGGDGGGGSPAPGSSGGVLNLEEEYRLHEKPVPSSIDPSWLQLFPTVWAERAGMGLANQVPPVVVELRSGASPVAVRQYPMSKEAREGIRPHIQRFLDLGVLVPCQSPWNTPLLPVKKPGTNDYRPVQDLREINKRVQDIHPTVPNPYNLLSSLPPSHTWYSVLDLKDAFFCLKLHPNSQPLFAFEWRDPEKGNTGQLTWTRLPQGFKNSPTLFNEALHRDLAPFRALNPQVVLLQYVDDLLVAAPTYRDCKEGTQKLLQELSKLGYRVSAKKAQLCQKEVTYLGYLLKEGKRWLTPARKATVMKIPPPTTPRQVREFLGTAGFCRLWIPGFASLAAPLYPLTKPSIPFIWTEEHQKAFDRIKEALLSAPALALPDLTKPFTLYVDERAGVARGVLTQTLGPWRRPVAYLSKKLDPVASGWPTCLKAVAAVALLLKDADKLTLGQNVTVIASHSLESIVRQPPDRWMTNARMTHYQSLLLNERVSFAPPAVLNPATLLPVESEATPVHRCSEILAEETGTRRDLKDQPLPGVPAWYTDGSSFIAEGKRRAGAAIVDGKRTVWASSLPEGTSAQKAELVALTQALRLAEGKDINIYTDSRYAFATAHIHGAIYKQRGWLTSAGKDIKNKEEILALLEAIHLPKRVAIIHCPGHQKGNDPVATGNRRADEAAKQAALSTRVLAETTKPAGKRTADGSEFEKRTADGSEFESPKKKAKVE

SEQ ID NO: 7142 - protein, 2094 aa, synthetic construct; identical to SEQ ID NO: 4525

SEQ ID NO: 7143 - protein, 2096 aa, synthetic construct
MPAAKRVKLDGGDKKYSIGLDIGTNSVGWAVITDEYKVPSKKFKVLGNTDRHSIKKNLIGALLFDSGETAEATRLKRTARRRYTRRKNRICYLQEIFSNEMAKVDDSFFHRLEESFLVEEDKKHERHPIFGNIVDEVAYHEKYPTIYHLRKKLVDSTDKADLRLIYLALAHMIKFRGHFLIEGDLNPDNSDVDKLFIQLVQTYNQLFEENPINASGVDAKAILSARLSKSRRLENLIAQLPGEKKNGLFGNLIALSLGLTPNFKSNFDLAEDAKLQLSKDTYDDDLDNLLAQIGDQYADLFLAAKNLSDAILLSDILRVNTEITKAPLSASMIKRYDEHHQDLTLLKALVRQQLPEKYKEIFFDQSKNGYAGYIDGGASQEEFYKFIKPILEKMDGTEELLVKLNREDLLRKQRTFDNGSIPHQIHLGELHAILRRQEDFYPFLKDNREKIEKILTFRIPYYVGPLARGNSRFAWMTRKSEETITPWNFEEVVDKGASAQSFIERMTNFDKNLPNEKVLPKHSLLYEYFTVYNELTKVKYVTEGMRKPAFLSGEQKKAIVDLLFKTNRKVTVKQLKEDYFKKIECFDSVEISGVEDRFNASLGTYHDLLKIIKDKDFLDNEENEDILEDIVLTLTLFEDREMIEERLKTYAHLFDDKVMKQLKRRRYTGWGRLSRKLINGIRDKQSGKTILDFLKSDGFANRNFMQLIHDDSLTFKEDIQKAQVSGQGDSLHEHIANLAGSPAIKKGILQTVKVVDELVKVMGRHKPENIVIEMARENQTTQKGQKNSRERMKRIEEGIKELGSQILKEHPVENTQLQNEKLYLYYLQNGRDMYVDQELDINRLSDYDVDHIVPQSFLKDDSIDNKVLTRSDKARGKSDNVPSEEVVKKMKNYWRQLLNAKLITQRKFDNLTKAERGGLSELDKAGFIKRQLVETRQITKHVAQILDSRMNTKYDENDKLIREVKVITLKSKLVSDFRKDFQFYKVREINNYHHAHDAYLNAVVGTALIKKYPKLESEFVYGDYKVYDVRKMIAKSEQEIGKATAKYFFYSNIMNFFKTEITLANGEIRKRPLIETNGETGEIVWDKGRDFATVRKVLSMPQVNIVKKTEVQTGGFSKESILPKRNSDKLIARKKDWDPKKYGGFDSPTVAYSVLVVAKVEKGKSKKLKSVKELLGITIMERSSFEKNPIDFLEAKGYKEVKKDLIIKLPKYSLFELENGRKRMLASAGELQKGNELALPSKYVNFLYLASHYEKLKGSPEDNEQKQLFVEQHKHYLDEIIEQISEFSKRVILADANLDKVLSAYNKHRDKPIREQAENIIHLFTLTNLGAPAAFKYFDTTIDRKRYTSTKEVLDATLIHQSITGLYETRIDLSQLGGDGGGSSGGSPAPGGTAPLEEEYRLFLEAPIQNVTLLEQWKREIPKVWAEINPPGLASTQAPIHVQLLSTALPVRVRQYPITLEAKRSLRETIRKFRAAGILRPVHSPWNTPLLPVRKSGTSEYRMVQDLREVNKRVETIHPTVPNPYTLLSLLPPDRIWYSVLDLKDAFFCIPLAPESQLIFAFEWADAEEGESGQLTWTRLPQGFKNSPTLFNEALNRDLQGFRLDHPSVSLLQYVDDLLIAADTQAACLSATRDLLMTLAELGYRVSGKKAQLCQEEVTYLGFKIHKGSRSLSNSRTQAILQIPVPKTKRQVREFLGKIGYCRLFIPGFAELAQPLYAATRPGNDPLVWGEKEEEAFQSLKLALTQPPALALPSLDKPFQLFVEETSGAAKGVLTQALGPWKRPVAYLSKRLDPVAAGWPRCLRAIAAAALLTREASKLTFGQDIEITSSHNLESLLRSPPDKWLTNARITQYQVLLLDPPRVRFKQTAALNPATLLPETDDTLPIHHCLDTLDSLTSTRPDLTDQPLAQAEATLFTDGSSYIRDGKRYAGAAVVTLDSVIWAEPLPIGTSAQKAELIALTKALEWSKDKSVNIYTDSRYAFATLHVHGMIYRERGWLTAGGKAIKNAPEILALLTAVWLPKRVAVMHCKGHQKDDAPTSTGNRRADEVAREVAIRPLSTQATISAGKRTADGSEFEKRTADGSEFESPKKKAKVE

SEQ ID NO: 7144 - protein, 2093 aa, synthetic construct
MPAAKRVKLDGGDKKYSIGLDIGTNSVGWAVITDEYKVPSKKFKVLGNTDRHSIKKNLIGALLFDSGETAEATRLKRTARRRYTRRKNRICYLQEIFSNEMAKVDDSFFHRLEESFLVEEDKKHERHPIFGNIVDEVAYHEKYPTIYHLRKKLVDSTDKADLRLIYLALAHMIKFRGHFLIEGDLNPDNSDVDKLFIQLVQTYNQLFEENPINASGVDAKAILSARLSKSRRLENLIAQLPGEKKNGLFGNLIALSLGLTPNFKSNFDLAEDAKLQLSKDTYDDDLDNLLAQIGDQYADLFLAAKNLSDAILLSDILRVNTEITKAPLSASMIKRYDEHHQDLTLLKALVRQQLPEKYKEIFFDQSKNGYAGYIDGGASQEEFYKFIKPILEKMDGTEELLVKLNREDLLRKQRTFDNGSIPHQIHLGELHAILRRQEDFYPFLKDNREKIEKILTFRIPYYVGPLARGNSRFAWMTRKSEETITPWNFEEVVDKGASAQSFIERMTNFDKNLPNEKVLPKHSLLYEYFTVYNELTKVKYVTEGMRKPAFLSGEQKKAIVDLLFKTNRKVTVKQLKEDYFKKIECFDSVEISGVEDRFNASLGTYHDLLKIIKDKDFLDNEENEDILEDIVLTLTLFEDREMIEERLKTYAHLFDDKVMKQLKRRRYTGWGRLSRKLINGIRDKQSGKTILDFLKSDGFANRNFMQLIHDDSLTFKEDIQKAQVSGQGDSLHEHIANLAGSPAIKKGILQTVKVVDELVKVMGRHKPENIVIEMARENQTTQKGQKNSRERMKRIEEGIKELGSQILKEHPVENTQLQNEKLYLYYLQNGRDMYVDQELDINRLSDYDVDHIVPQSFLKDDSIDNKVLTRSDKARGKSDNVPSEEVVKKMKNYWRQLLNAKLITQRKFDNLTKAERGGLSELDKAGFIKRQLVETRQITKHVAQILDSRMNTKYDENDKLIREVKVITLKSKLVSDFRKDFQFYKVREINNYHHAHDAYLNAVVGTALIKKYPKLESEFVYGDYKVYDVRKMIAKSEQEIGKATAKYFFYSNIMNFFKTEITLANGEIRKRPLIETNGETGEIVWDKGRDFATVRKVLSMPQVNIVKKTEVQTGGFSKESILPKRNSDKLIARKKDWDPKKYGGFDSPTVAYSVLVVAKVEKGKSKKLKSVKELLGITIMERSSFEKNPIDFLEAKGYKEVKKDLIIKLPKYSLFELENGRKRMLASAGELQKGNELALPSKYVNFLYLASHYEKLKGSPEDNEQKQLFVEQHKHYLDEIIEQISEFSKRVILADANLDKVLSAYNKHRDKPIREQAENIIHLFTLTNLGAPAAFKYFDTTIDRKRYTSTKEVLDATLIHQSITGLYETRIDLSQLGGDGGGSSGGSPAPGGTLQLEEEYRLFEPESTQKQEMDIWLKNFPQAWAETGGMGTAHCQAPVLIQLKATATPISIRQYPMPHEAYQGIKPHIRRMLDQGILKPCQSPWNTPLLPVKKPGTEDYRPVQDLREVNKRVEDIHPTVPNPYNLLSTLPPSHPWYTVLDLKDAFFCLRLHSESQLLFAFEWRDPEIGLSGQLTWTRLPQGFKNSPTLFNEALHSDLADFRVRYPALVLLQYVDDLLLAAATRTECLEGTKALLETLGNKGYRASAKKAQICLQEVTYLGYSLKDGQRWLTKARKEAILSIPVPKNSRQVREFLGKAGYCRLFIPGFAELAAPLYPLTRPGTLFQWGTEQQLAFEDIKKALLSSPALGLPDITKPFELFIDENSGFAKGVLVQKLGPWKRPVAYLSKKLDTVASGWPPCLRMVAAIAILVKDAGKLTLGQPLTILTSHPVEALVRQPPNKWLSNARMTHYQAMLLDAERVHFGPTVSLNPATLLPLPSGGNHHDCLQILAETHGTRPDLTDQPLPDADLTWYTDGSSFIRNGEREAGAAVTTESEVIWAAPLPPGTSAQRAELIALTQALKMAEGKKLTVYTDSRYAFATTHVHGEIYRRRGWLTSEGKEIKNKNEILALLEALFLPKRLSIIHCPGHQKGDSPQAKGNRLADDTAKKAATETHSSLTVLPAGKRTADGSEFEKRTADGSEFESPKKKAKVE

SEQ ID NO: 7145 - protein, 2174 aa, synthetic construct
MPAAKRVKLDGGDKKYSIGLDIGTNSVGWAVITDEYKVPSKKFKVLGNTDRHSIKKNLIGALLFDSGETAEATRLKRTARRRYTRRKNRICYLQEIFSNEMAKVDDSFFHRLEESFLVEEDKKHERHPIFGNIVDEVAYHEKYPTIYHLRKKLVDSTDKADLRLIYLALAHMIKFRGHFLIEGDLNPDNSDVDKLFIQLVQTYNQLFEENPINASGVDAKAILSARLSKSRRLENLIAQLPGEKKNGLFGNLIALSLGLTPNFKSNFDLAEDAKLQLSKDTYDDDLDNLLAQIGDQYADLFLAAKNLSDAILLSDILRVNTEITKAPLSASMIKRYDEHHQDLTLLKALVRQQLPEKYKEIFFDQSKNGYAGYIDGGASQEEFYKFIKPILEKMDGTEELLVKLNREDLLRKQRTFDNGSIPHQIHLGELHAILRRQEDFYPFLKDNREKIEKILTFRIPYYVGPLARGNSRFAWMTRKSEETITPWNFEEVVDKGASAQSFIERMTNFDKNLPNEKVLPKHSLLYEYFTVYNELTKVKYVTEGMRKPAFLSGEQKKAIVDLLFKTNRKVTVKQLKEDYFKKIECFDSVEISGVEDRFNASLGTYHDLLKIIKDKDFLDNEENEDILEDIVLTLTLFEDREMIEERLKTYAHLFDDKVMKQLKRRRYTGWGRLSRKLINGIRDKQSGKTILDFLKSDGFANRNFMQLIHDDSLTFKEDIQKAQVSGQGDSLHEHIANLAGSPAIKKGILQTVKVVDELVKVMGRHKPENIVIEMARENQTTQKGQKNSRERMKRIEEGIKELGSQILKEHPVENTQLQNEKLYLYYLQNGRDMYVDQELDINRLSDYDVDHIVPQSFLKDDSIDNKVLTRSDKARGKSDNVPSEEVVKKMKNYWRQLLNAKLITQRKFDNLTKAERGGLSELDKAGFIKRQLVETRQITKHVAQILDSRMNTKYDENDKLIREVKVITLKSKLVSDFRKDFQFYKVREINNYHHAHDAYLNAVVGTALIKKYPKLESEFVYGDYKVYDVRKMIAKSEQEIGKATAKYFFYSNIMNFFKTEITLANGEIRKRPLIETNGETGEIVWDKGRDFATVRKVLSMPQVNIVKKTEVQTGGFSKESILPKRNSDKLIARKKDWDPKKYGGFDSPTVAYSVLVVAKVEKGKSKKLKSVKELLGITIMERSSFEKNPIDFLEAKGYKEVKKDLIIKLPKYSLFELENGRKRMLASAGELQKGNELALPSKYVNFLYLASHYEKLKGSPEDNEQKQLFVEQHKHYLDEIIEQISEFSKRVILADANLDKVLSAYNKHRDKPIREQAENIIHLFTLTNLGAPAAFKYFDTTIDRKRYTSTKEVLDATLIHQSITGLYETRIDLSQLGGDGGGSSGGSPAPGGMNPLQLLQPLPAEIKGTKLLAHWNSGATITCIPESFLEDEQPIKKTLIKTIHGEKQQNVYYVTFKVKGRKVEAEVIASPYEYILLSPTDVPWLTQQPLQLTILVPLQEYQEKILSKTALPEDQKQQLKTLFVKYDNLWQHWENQVGHRKIRPHNIATGDYPPRPQKQYPINPKAKPSIQIVIDDLLKQGVLTPQNSTMNTPVYPVPKPDGRWRMVLDYREVNKTIPLTAAQNQHSAGILATIVRQKYKTTLDLANGFWAHPITPESYWLTAFTWQGKQYCWTRLPQGFLNSPALFNADVVDLLKEIPNVQVYVDDIYLSHDDPKEHVQQLEKVFQILLQAGYVVSLKKSEIGQKTVEFLGFNITKEGRGLTDTFKTKLLNITPPKDLKQLQSILGKLNFARNFIPNFAELVQPLYNLIAPAKGKYIEWSEENTKQLNMVIEALNTASNLEERLPEQRLVIKVNTSPSAGYVRYYNETGKKPIMYLNYVFSKAELKFSMLEKLLTTMHKALIKAMDLAMGQEILVYSPIVSMTKIQKTPLPERKALPIRWITWMTYLEDPRIQFHYDKTLPELKHIPDVYTSSQSPVKHPSQYEGVFYTDGSAIKSPDPTKSNNAGMGIVHATYKPEYQVLNQWSIPLGNHTAQMAEIAAVEFACKKALKIPGPVLVITDSFYVAESANKELPYWKSNGFVNNKKKPLKHISKWKSIAECLSMKPDITIQHEKGISLQIPVFILKGNALADKLATQGSYVVNAGKRTADGSEFEKRTADGSEFESPKKKAKVE

SEQ ID NO: 7146 - protein, 2092 aa, synthetic construct
MPAAKRVKLDGGDKKYSIGLDIGTNSVGWAVITDEYKVPSKKFKVLGNTDRHSIKKNLIGALLFDSGETAEATRLKRTARRRYTRRKNRICYLQEIFSNEMAKVDDSFFHRLEESFLVEEDKKHERHPIFGNIVDEVAYHEKYPTIYHLRKKLVDSTDKADLRLIYLALAHMIKFRGHFLIEGDLNPDNSDVDKLFIQLVQTYNQLFEENPINASGVDAKAILSARLSKSRRLENLIAQLPGEKKNGLFGNLIALSLGLTPNFKSNFDLAEDAKLQLSKDTYDDDLDNLLAQIGDQYADLFLAAKNLSDAILLSDILRVNTEITKAPLSASMIKRYDEHHQDLTLLKALVRQQLPEKYKEIFFDQSKNGYAGYIDGGASQEEFYKFIKPILEKMDGTEELLVKLNREDLLRKQRTFDNGSIPHQIHLGELHAILRRQEDFYPFLKDNREKIEKILTFRIPYYVGPLARGNSRFAWMTRKSEETITPWNFEEVVDKGASAQSFIERMTNFDKNLPNEKVLPKHSLLYEYFTVYNELTKVKYVTEGMRKPAFLSGEQKKAIVDLLFKTNRKVTVKQLKEDYFKKIECFDSVEISGVEDRFNASLGTYHDLLKIIKDKDFLDNEENEDILEDIVLTLTLFEDREMIEERLKTYAHLFDDKVMKQLKRRRYTGWGRLSRKLINGIRDKQSGKTILDFLKSDGFANRNFMQLIHDDSLTFKEDIQKAQVSGQGDSLHEHIANLAGSPAIKKGILQTVKVVDELVKVMGRHKPENIVIEMARENQTTQKGQKNSRERMKRIEEGIKELGSQILKEHPVENTQLQNEKLYLYYLQNGRDMYVDQELDINRLSDYDVDHIVPQSFLKDDSIDNKVLTRSDKARGKSDNVPSEEVVKKMKNYWRQLLNAKLITQRKFDNLTKAERGGLSELDKAGFIKRQLVETRQITKHVAQILDSRMNTKYDENDKLIREVKVITLKSKLVSDFRKDFQFYKVREINNYHHAHDAYLNAVVGTALIKKYPKLESEFVYGDYKVYDVRKMIAKSEQEIGKATAKYFFYSNIMNFFKTEITLANGEIRKRPLIETNGETGEIVWDKGRDFATVRKVLSMPQVNIVKKTEVQTGGFSKESILPKRNSDKLIARKKDWDPKKYGGFDSPTVAYSVLVVAKVEKGKSKKLKSVKELLGITIMERSSFEKNPIDFLEAKGYKEVKKDLIIKLPKYSLFELENGRKRMLASAGELQKGNELALPSKYVNFLYLASHYEKLKGSPEDNEQKQLFVEQHKHYLDEIIEQISEFSKRVILADANLDKVLSAYNKHRDKPIREQAENIIHLFTLTNLGAPAAFKYFDTTIDRKRYTSTKEVLDATLIHQSITGLYETRIDLSQLGGDGGGSSGGSPAPGGVLNLEEEYRLHEKPVPSSIDPSWLQLFPTVWAERAGMGLANQVPPVVVELRSGASPVAVRQYPMSKEAREGIRPHIQKFLDLGVLVPCRSPWNTPLLPVKKPGTNDYRPVQDLREINKRVQDIHPTVPNPYNLLSSLPPSYTWYSVLDLKDAFFCLRLHPNSQPLFAFEWKDPEKGNTGQLTWTRLPQGFKNSPTLFNEALHRDLAPFRALNPQVVLLQYVDDLLVAAPTYEDCKKGTQKLLQELSKLGYRVSAKKAQLCQREVTYLGYLLKEGKRWLTPARKATVMKIPVPTTPRQVREFLGKAGFCRLFIPGFASLAAPLYPLTKPSIPFIWTEEHQQAFDHIKKALLSAPALALPDLTKPFTLYIDERAGVARGVLTQTLGPWRRPVAYLSKKLDPVASGWPTCLKAVAAVALLLKDADKLTLGQNVTVIASHSLESIVRQPPDRWMTNARMTHYQSLLLNERVSFAPPAVLNPATLLPVESEATPVHRCSEILAEETGTRRDLEDQPLPGVPTWYTDGSSFITEGKRRAGAPIVDGKRTVWASSLPEGTSAQKAELVALTQALRLAEGKNINIYTDSRYAFATAHIHGAIYKQRGWLTSAGKDIKNKEEILALLEAIHLPRRVAIIHCPGHQRGSNPVATGNRRADEAAKQAALSTRVLAGTTKPAGKRTADGSEFEKRTADGSEFESPKKKAKVE

SEQ ID NO: 7147 - protein, 2094 aa, synthetic construct
MPAAKRVKLDGGDKKYSIGLDIGTNSVGWAVITDEYKVPSKKFKVLGNTDRHSIKKNLIGALLFDSGETAEATRLKRTARRRYTRRKNRICYLQEIFSNEMAKVDDSFFHRLEESFLVEEDKKHERHPIFGNIVDEVAYHEKYPTIYHLRKKLVDSTDKADLRLIYLALAHMIKFRGHFLIEGDLNPDNSDVDKLFIQLVQTYNQLFEENPINASGVDAKAILSARLSKSRRLENLIAQLPGEKKNGLFGNLIALSLGLTPNFKSNFDLAEDAKLQLSKDTYDDDLDNLLAQIGDQYADLFLAAKNLSDAILLSDILRVNTEITKAPLSASMIKRYDEHHQDLTLLKALVRQQLPEKYKEIFFDQSKNGYAGYIDGGASQEEFYKFIKPILEKMDGTEELLVKLNREDLLRKQRTFDNGSIPHQIHLGELHAILRRQEDFYPFLKDNREKIEKILTFRIPYYVGPLARGNSRFAWMTRKSEETITPWNFEEVVDKGASAQSFIERMTNFDKNLPNEKVLPKHSLLYEYFTVYNELTKVKYVTEGMRKPAFLSGEQKKAIVDLLFKTNRKVTVKQLKEDYFKKIECFDSVEISGVEDRFNASLGTYHDLLKIIKDKDFLDNEENEDILEDIVLTLTLFEDREMIEERLKTYAHLFDDKVMKQLKRRRYTGWGRLSRKLINGIRDKQSGKTILDFLKSDGFANRNFMQLIHDDSLTFKEDIQKAQVSGQGDSLHEHIANLAGSPAIKKGILQTVKVVDELVKVMGRHKPENIVIEMARENQTTQKGQKNSRERMKRIEEGIKELGSQILKEHPVENTQLQNEKLYLYYLQNGRDMYVDQELDINRLSDYDVDHIVPQSFLKDDSIDNKVLTRSDKARGKSDNVPSEEVVKKMKNYWRQLLNAKLITQRKFDNLTKAERGGLSELDKAGFIKRQLVETRQITKHVAQILDSRMNTKYDENDKLIREVKVITLKSKLVSDFRKDFQFYKVREINNYHHAHDAYLNAVVGTALIKKYPKLESEFVYGDYKVYDVRKMIAKSEQEIGKATAKYFFYSNIMNFFKTEITLANGEIRKRPLIETNGETGEIVWDKGRDFATVRKVLSMPQVNIVKKTEVQTGGFSKESILPKRNSDKLIARKKDWDPKKYGGFDSPTVAYSVLVVAKVEKGKSKKLKSVKELLGITIMERSSFEKNPIDFLEAKGYKEVKKDLIIKLPKYSLFELENGRKRMLASAGELQKGNELALPSKYVNFLYLASHYEKLKGSPEDNEQKQLFVEQHKHYLDEIIEQISEFSKRVILADANLDKVLSAYNKHRDKPIREQAENIIHLFTLTNLGAPAAFKYFDTTIDRKRYTSTKEVLDATLIHQSITGLYETRIDLSQLGGDGGGSSGGSPAPGGTLNIEDEYRLHETSKEPDVSLGSTWLSDFPQAWAETGGMGLAVRQAPLIIPLKATSTPVSIKQYPMSQEARLGIKPHIQRLLDQGILVPCQSPWNTPLLPVKKPGTNDYRPVQDLREVNKRVEDIHPTVPNPYNLLSGLPPSHQWYTVLDLKDAFFCLRLHPTSQPLFAFEWRDPEMGISGQLTWTRLPQGFKNSPTLFNEALHRDLAGFRIQHPDLILLQYVDDLLLAATSELDCQQGTRALLQTLGDLGYRASAKKAQICQKQVKYLGYLLKEGQRWLTEARKETVMGQPIPKTPRQLREFLGTAGFCRLWIPGFAEMAAPLYPLTKPGTLFNWGPDQQKAFQEIKQALLTAPALGLPDLTKPFELFVDEKQGYAKGVLTQKLGPWRRPVAYLSKKLDPVAAGWPPCLRMVAAIAVLTKDAGKLTMGQPLVILAPHAVEALVKQPPDRWLSNARMTHYQALLLDTDRVQFGPVVALNPATLLPLPEEGLQHDCLDILAEAHGTRSDLMDQPLPDADHTWYTDGSSFLQEGQRKAGAAVTTETEVIWARALPAGTSAQRAELIALTQALKMAEGKKLNVYTDSRYAFATAHIHGEIYRRRGWLTSEGKEIKNKDEILALLKALFLPKRLSIIHCPGHQKGNSAEARGNRMADQAAREVATRETPETSTLLAGKRTADGSEFEKRTADGSEFESPKKKAKVE

SEQ ID NO: 7148 - protein, 2092 aa, synthetic construct
MPAAKRVKLDGGDKKYSIGLDIGTNSVGWAVITDEYKVPSKKFKVLGNTDRHSIKKNLIGALLFDSGETAEATRLKRTARRRYTRRKNRICYLQEIFSNEMAKVDDSFFHRLEESFLVEEDKKHERHPIFGNIVDEVAYHEKYPTIYHLRKKLVDSTDKADLRLIYLALAHMIKFRGHFLIEGDLNPDNSDVDKLFIQLVQTYNQLFEENPINASGVDAKAILSARLSKSRRLENLIAQLPGEKKNGLFGNLIALSLGLTPNFKSNFDLAEDAKLQLSKDTYDDDLDNLLAQIGDQYADLFLAAKNLSDAILLSDILRVNTEITKAPLSASMIKRYDEHHQDLTLLKALVRQQLPEKYKEIFFDQSKNGYAGYIDGGASQEEFYKFIKPILEKMDGTEELLVKLNREDLLRKQRTFDNGSIPHQIHLGELHAILRRQEDFYPFLKDNREKIEKILTFRIPYYVGPLARGNSRFAWMTRKSEETITPWNFEEVVDKGASAQSFIERMTNFDKNLPNEKVLPKHSLLYEYFTVYNELTKVKYVTEGMRKPAFLSGEQKKAIVDLLFKTNRKVTVKQLKEDYFKKIECFDSVEISGVEDRFNASLGTYHDLLKIIKDKDFLDNEENEDILEDIVLTLTLFEDREMIEERLKTYAHLFDDKVMKQLKRRRYTGWGRLSRKLINGIRDKQSGKTILDFLKSDGFANRNFMQLIHDDSLTFKEDIQKAQVSGQGDSLHEHIANLAGSPAIKKGILQTVKVVDELVKVMGRHKPENIVIEMARENQTTQKGQKNSRERMKRIEEGIKELGSQILKEHPVENTQLQNEKLYLYYLQNGRDMYVDQELDINRLSDYDVDHIVPQSFLKDDSIDNKVLTRSDKARGKSDNVPSEEVVKKMKNYWRQLLNAKLITQRKFDNLTKAERGGLSELDKAGFIKRQLVETRQITKHVAQILDSRMNTKYDENDKLIREVKVITLKSKLVSDFRKDFQFYKVREINNYHHAHDAYLNAVVGTALIKKYPKLESEFVYGDYKVYDVRKMIAKSEQEIGKATAKYFFYSNIMNFFKTEITLANGEIRKRPLIETNGETGEIVWDKGRDFATVRKVLSMPQVNIVKKTEVQTGGFSKESILPKRNSDKLIARKKDWDPKKYGGFDSPTVAYSVLVVAKVEKGKSKKLKSVKELLGITIMERSSFEKNPIDFLEAKGYKEVKKDLIIKLPKYSLFELENGRKRMLASAGELQKGNELALPSKYVNFLYLASHYEKLKGSPEDNEQKQLFVEQHKHYLDEIIEQISEFSKRVILADANLDKVLSAYNKHRDKPIREQAENIIHLFTLTNLGAPAAFKYFDTTIDRKRYTSTKEVLDATLIHQSITGLYETRIDLSQLGGDGGGSSGGSPAPGGVLNLEEEYRLHEKPVPSSIDPSWLQLFPTVWAERAGMGLANQVPPVVVELRSGASPVAVRQYPMSKEAREGIRPHIQRFLDLGVLVPCQSPWNTPLLPVKKPGTNDYRPVQDLREINKRVQDIHPTVPNPYNLLSSLPPSHTWYSVLDLKDAFFCLKLHPNSQPLFAFEWRDPEKGNTGQLTWTRLPQGFKNSPTLFNEALHRDLAPFRALNPQVVLLQYVDDLLVAAPTYRDCKEGTQKLLQELSKLGYRVSAKKAQLCQKEVTYLGYLLKEGKRWLTPARKATVMKIPPPTTPRQVREFLGTAGFCRLWIPGFASLAAPLYPLTKPSIPFIWTEEHQKAFDRIKEALLSAPALALPDLTKPFTLYVDERAGVARGVLTQTLGPWRRPVAYLSKKLDPVASGWPTCLKAVAAVALLLKDADKLTLGQNVTVIASHSLESIVRQPPDRWMTNARMTHYQSLLLNERVSFAPPAVLNPATLLPVESEATPVHRCSEILAEETGTRRDLKDQPLPGVPAWYTDGSSFIAEGKRRAGAAIVDGKRTVWASSLPEGTSAQKAELVALTQALRLAEGKDINIYTDSRYAFATAHIHGAIYKQRGWLTSAGKDIKNKEEILALLEAIHLPKRVAIIHCPGHQKGNDPVATGNRRADEAAKQAALSTRVLAETTKPAGKRTADGSEFEKRTADGSEFESPKKKAKVE

SEQ ID NO: 7149 - protein, 2092 aa, synthetic construct
MPAAKRVKLDGGDKKYSIGLDIGTNSVGWAVITDEYKVPSKKFKVLGNTDRHSIKKNLIGALLFDSGETAEATRLKRTARRRYTRRKNRICYLQEIFSNEMAKVDDSFFHRLEESFLVEEDKKHERHPIFGNIVDEVAYHEKYPTIYHLRKKLVDSTDKADLRLIYLALAHMIKFRGHFLIEGDLNPDNSDVDKLFIQLVQTYNQLFEENPINASGVDAKAILSARLSKSRRLENLIAQLPGEKKNGLFGNLIALSLGLTPNFKSNFDLAEDAKLQLSKDTYDDDLDNLLAQIGDQYADLFLAAKNLSDAILLSDILRVNTEITKAPLSASMIKRYDEHHQDLTLLKALVRQQLPEKYKEIFFDQSKNGYAGYIDGGASQEEFYKFIKPILEKMDGTEELLVKLNREDLLRKQRTFDNGSIPHQIHLGELHAILRRQEDFYPFLKDNREKIEKILTFRIPYYVGPLARGNSRFAWMTRKSEETITPWNFEEVVDKGASAQSFIERMTNFDKNLPNEKVLPKHSLLYEYFTVYNELTKVKYVTEGMRKPAFLSGEQKKAIVDLLFKTNRKVTVKQLKEDYFKKIECFDSVEISGVEDRFNASLGTYHDLLKIIKDKDFLDNEENEDILEDIVLTLTLFEDREMIEERLKTYAHLFDDKVMKQLKRRRYTGWGRLSRKLINGIRDKQSGKTILDFLKSDGFANRNFMQLIHDDSLTFKEDIQKAQVSGQGDSLHEHIANLAGSPAIKKGILQTVKVVDELVKVMGRHKPENIVIEMARENQTTQKGQKNSRERMKRIEEGIKELGSQILKEHPVENTQLQNEKLYLYYLQNGRDMYVDQELDINRLSDYDVDHIVPQSFLKDDSIDNKVLTRSDKARGKSDNVPSEEVVKKMKNYWRQLLNAKLITQRKFDNLTKAERGGLSELDKAGFIKRQLVETRQITKHVAQILDSRMNTKYDENDKLIREVKVITLKSKLVSDFRKDFQFYKVREINNYHHAHDAYLNAVVGTALIKKYPKLESEFVYGDYKVYDVRKMIAKSEQEIGKATAKYFFYSNIMNFFKTEITLANGEIRKRPLIETNGETGEIVWDKGRDFATVRKVLSMPQVNIVKKTEVQTGGFSKESILPKRNSDKLIARKKDWDPKKYGGFDSPTVAYSVLVVAKVEKGKSKKLKSVKELLGITIMERSSFEKNPIDFLEAKGYKEVKKDLIIKLPKYSLFELENGRKRMLASAGELQKGNELALPSKYVNFLYLASHYEKLKGSPEDNEQKQLFVEQHKHYLDEIIEQISEFSKRVILADANLDKVLSAYNKHRDKPIREQAENIIHLFTLTNLGAPAAFKYFDTTIDRKRYTSTKEVLDATLIHQSITGLYETRIDLSQLGGDGGGSSGGSPAPGGVLNLEEEYRLHEKPVPSSIDPSWLQLFPTVWAERAGMGLANQVPPVVVELRSGASPVAVRQYPMSKEAREGIRPHIQRFLDLGVLVPCQSPWNTPLLPVKKPGTNDYRPVQDLREINKRVQDIHPTVPNPYNLLSSLPPSHTWYSVLDLKDAFFCLKLHPNSQPLFAFEWRDPEKGNTGQLTWTRLPQGFKNSPTLFNEALHRDLAPFRALNPQVVLLQYVDDLLVAAPTYRDCKEGTQKLLQELSKLGYRVSAKKAQLCQKEVTYLGYLLKEGKRWLTPARKATVMKIPPPTTPRQVREFLGKAGFCRLFIPGFASLAAPLYPLTKPSIPFIWTEEHQKAFDRIKEALLSAPALALPDLTKPFTLYVDERAGVARGVLTQTLGPWRRPVAYLSKKLDPVASGWPTCLKAVAAVALLLKDADKLTLGQNVTVIASHSLESIVRQPPDRWMTNARMTHYQSLLLNERVSFAPPAVLNPATLLPVESEATPVHRCSEILAEETGTRRDLKDQPLPGVPAWYTDGSSFIAEGKRRAGAAIVDGKRTVWASSLPEGTSAQKAELVALTQALRLAEGKDINIYTDSRYAFATAHIHGAIYKQRGWLTSAGKDIKNKEEILALLEAIHLPKRVAIIHCPGHQKGNDPVATGNRRADEAAKQAALSTRVLAETTKPAGKRTADGSEFEKRTADGSEFESPKKKAKVE

SEQ ID NO: 7150 - protein, 2094 aa, synthetic construct
MPAAKRVKLDGGDKKYSIGLDIGTNSVGWAVITDEYKVPSKKFKVLGNTDRHSIKKNLIGALLFDSGETAEATRLKRTARRRYTRRKNRICYLQEIFSNEMAKVDDSFFHRLEESFLVEEDKKHERHPIFGNIVDEVAYHEKYPTIYHLRKKLVDSTDKADLRLIYLALAHMIKFRGHFLIEGDLNPDNSDVDKLFIQLVQTYNQLFEENPINASGVDAKAILSARLSKSRRLENLIAQLPGEKKNGLFGNLIALSLGLTPNFKSNFDLAEDAKLQLSKDTYDDDLDNLLAQIGDQYADLFLAAKNLSDAILLSDILRVNTEITKAPLSASMIKRYDEHHQDLTLLKALVRQQLPEKYKEIFFDQSKNGYAGYIDGGASQEEFYKFIKPILEKMDGTEELLVKLNREDLLRKQRTFDNGSIPHQIHLGELHAILRRQEDFYPFLKDNREKIEKILTFRIPYYVGPLARGNSRFAWMTRKSEETITPWNFEEVVDKGASAQSFIERMTNFDKNLPNEKVLPKHSLLYEYFTVYNELTKVKYVTEGMRKPAFLSGEQKKAIVDLLFKTNRKVTVKQLKEDYFKKIECFDSVEISGVEDRFNASLGTYHDLLKIIKDKDFLDNEENEDILEDIVLTLTLFEDREMIEERLKTYAHLFDDKVMKQLKRRRYTGWGRLSRKLINGIRDKQSGKTILDFLKSDGFANRNFMQLIHDDSLTFKEDIQKAQVSGQGDSLHEHIANLAGSPAIKKGILQTVKVVDELVKVMGRHKPENIVIEMARENQTTQKGQKNSRERMKRIEEGIKELGSQILKEHPVENTQLQNEKLYLYYLQNGRDMYVDQELDINRLSDYDVDHIVPQSFLKDDSIDNKVLTRSDKARGKSDNVPSEEVVKKMKNYWRQLLNAKLITQRKFDNLTKAERGGLSELDKAGFIKRQLVETRQITKHVAQILDSRMNTKYDENDKLIREVKVITLKSKLVSDFRKDFQFYKVREINNYHHAHDAYLNAVVGTALIKKYPKLESEFVYGDYKVYDVRKMIAKSEQEIGKATAKYFFYSNIMNFFKTEITLANGEIRKRPLIETNGETGEIVWDKGRDFATVRKVLSMPQVNIVKKTEVQTGGFSKESILPKRNSDKLIARKKDWDPKKYGGFDSPTVAYSVLVVAKVEKGKSKKLKSVKELLGITIMERSSFEKNPIDFLEAKGYKEVKKDLIIKLPKYSLFELENGRKRMLASAGELQKGNELALPSKYVNFLYLASHYEKLKGSPEDNEQKQLFVEQHKHYLDEIIEQISEFSKRVILADANLDKVLSAYNKHRDKPIREQAENIIHLFTLTNLGAPAAFKYFDTTIDRKRYTSTKEVLDATLIHQSITGLYETRIDLSQLGGDGGGSSGGSPAPGGTLNIEDEYRLHETSKEPDVPLGSTWLSDFPQAWAETGGMGLAVRQAPLIIPLKATSTPVSIKQYPMSQEARLGIKPHIQRLLDQGILVPCQSPWNTPLLPVKKPGTNDYRPVQDLREVNKRVEDIHPTVPNPYNLLSGLPPSHQWYTVLDLKDAFFCLRLHPTSQPLFAFEWRDPEMGISGQLTWTRLPQGFKNSPTLFNEALHRDLADFRIQHPDLILLQYVDDLLLAATSEQDCQRGTRALLQTLGNLGYRASAKKAQICQKQVKYLGYLLKEGQRWLTEARKETVMGQPTPKTPRQLREFLGTAGFCRLWIPGFAEMAAPLYPLTKPGTLFNWGPDQQKAYQEIKQALLTAPALGLPDLTKPFELFVDEKQGYAKGVLTQKLGPWRRPVAYLSKKLDPVAAGWPPCLRMVAAIAVLTKDAGKLTMGQPLVILAPHAVEALVKQPPDRWLSNARMTHYQAMLLDTDRVQFGPVVALNPATLLPLPEKEAPHDCLEILAETHGTRPDLTDQPIPDADYTWYTDGSSFLQEGQRRAGAAVTTETEVIWARALPAGTSAQRAELIALTQALKMAEGKKLNVYTDSRYAFATAHVHGEIYRRRGWLTSEGREIKNKNEILALLKALFLPKRLSIIHCPGHQKGNSAEARGNRMADQAAREAAMKAVLETSTLLAGKRTADGSEFEKRTADGSEFESPKKKAKVE

SEQ ID NO: 7151 - protein, 2096 aa, synthetic construct
MPAAKRVKLDGGDKKYSIGLDIGTNSVGWAVITDEYKVPSKKFKVLGNTDRHSIKKNLIGALLFDSGETAEATRLKRTARRRYTRRKNRICYLQEIFSNEMAKVDDSFFHRLEESFLVEEDKKHERHPIFGNIVDEVAYHEKYPTIYHLRKKLVDSTDKADLRLIYLALAHMIKFRGHFLIEGDLNPDNSDVDKLFIQLVQTYNQLFEENPINASGVDAKAILSARLSKSRRLENLIAQLPGEKKNGLFGNLIALSLGLTPNFKSNFDLAEDAKLQLSKDTYDDDLDNLLAQIGDQYADLFLAAKNLSDAILLSDILRVNTEITKAPLSASMIKRYDEHHQDLTLLKALVRQQLPEKYKEIFFDQSKNGYAGYIDGGASQEEFYKFIKPILEKMDGTEELLVKLNREDLLRKQRTFDNGSIPHQIHLGELHAILRRQEDFYPFLKDNREKIEKILTFRIPYYVGPLARGNSRFAWMTRKSEETITPWNFEEVVDKGASAQSFIERMTNFDKNLPNEKVLPKHSLLYEYFTVYNELTKVKYVTEGMRKPAFLSGEQKKAIVDLLFKTNRKVTVKQLKEDYFKKIECFDSVEISGVEDRFNASLGTYHDLLKIIKDKDFLDNEENEDILEDIVLTLTLFEDREMIEERLKTYAHLFDDKVMKQLKRRRYTGWGRLSRKLINGIRDKQSGKTILDFLKSDGFANRNFMQLIHDDSLTFKEDIQKAQVSGQGDSLHEHIANLAGSPAIKKGILQTVKVVDELVKVMGRHKPENIVIEMARENQTTQKGQKNSRERMKRIEEGIKELGSQILKEHPVENTQLQNEKLYLYYLQNGRDMYVDQELDINRLSDYDVDHIVPQSFLKDDSIDNKVLTRSDKARGKSDNVPSEEVVKKMKNYWRQLLNAKLITQRKFDNLTKAERGGLSELDKAGFIKRQLVETRQITKHVAQILDSRMNTKYDENDKLIREVKVITLKSKLVSDFRKDFQFYKVREINNYHHAHDAYLNAVVGTALIKKYPKLESEFVYGDYKVYDVRKMIAKSEQEIGKATAKYFFYSNIMNFFKTEITLANGEIRKRPLIETNGETGEIVWDKGRDFATVRKVLSMPQVNIVKKTEVQTGGFSKESILPKRNSDKLIARKKDWDPKKYGGFDSPTVAYSVLVVAKVEKGKSKKLKSVKELLGITIMERSSFEKNPIDFLEAKGYKEVKKDLIIKLPKYSLFELENGRKRMLASAGELQKGNELALPSKYVNFLYLASHYEKLKGSPEDNEQKQLFVEQHKHYLDEIIEQISEFSKRVILADANLDKVLSAYNKHRDKPIREQAENIIHLFTLTNLGAPAAFKYFDTTIDRKRYTSTKEVLDATLIHQSITGLYETRIDLSQLGGDGGGSSPAPGGSGGTAPLEEEYRLFLEAPIQNVTLLEQWKREIPKVWAEINPPGLASTQAPIHVQLLSTALPVRVRQYPITLEAKRSLRETIRKFRAAGILRPVHSPWNTPLLPVRKSGTSEYRMVQDLREVNKRVETIHPTVPNPYTLLSLLPPDRIWYSVLDLKDAFFCIPLAPESQLIFAFEWADAEEGESGQLTWTRLPQGFKNSPTLFNEALNRDLQGFRLDHPSVSLLQYVDDLLIAADTQAACLSATRDLLMTLAELGYRVSGKKAQLCQEEVTYLGFKIHKGSRSLSNSRTQAILQIPVPKTKRQVREFLGTIGYCRLWIPGFAELAQPLYAATRPGNDPLVWGEKEEEAFQSLKLALTQPPALALPSLDKPFQLFVEETSGAAKGVLTQALGPWKRPVAYLSKRLDPVAAGWPRCLRAIAAAALLTREASKLTFGQDIEITSSHNLESLLRSPPDKWLTNARITQYQVLLLDPPRVRFKQTAALNPATLLPETDDTLPIHHCLDTLDSLTSTRPDLTDQPLAQAEATLFTDGSSYIRDGKRYAGAAVVTLDSVIWAEPLPIGTSAQKAELIALTKALEWSKDKSVNIYTDSRYAFATLHVHGMIYRERGWLTAGGKAIKNAPEILALLTAVWLPKRVAVMHCKGHQKDDAPTSTGNRRADEVAREVAIRPLSTQATISAGKRTADGSEFEKRTADGSEFESPKKKAKVE

SEQ ID NO: 7152 - protein, 2096 aa, synthetic construct
MPAAKRVKLDGGDKKYSIGLDIGTNSVGWAVITDEYKVPSKKFKVLGNTDRHSIKKNLIGALLFDSGETAEATRLKRTARRRYTRRKNRICYLQEIFSNEMAKVDDSFFHRLEESFLVEEDKKHERHPIFGNIVDEVAYHEKYPTIYHLRKKLVDSTDKADLRLIYLALAHMIKFRGHFLIEGDLNPDNSDVDKLFIQLVQTYNQLFEENPINASGVDAKAILSARLSKSRRLENLIAQLPGEKKNGLFGNLIALSLGLTPNFKSNFDLAEDAKLQLSKDTYDDDLDNLLAQIGDQYADLFLAAKNLSDAILLSDILRVNTEITKAPLSASMIKRYDEHHQDLTLLKALVRQQLPEKYKEIFFDQSKNGYAGYIDGGASQEEFYKFIKPILEKMDGTEELLVKLNREDLLRKQRTFDNGSIPHQIHLGELHAILRRQEDFYPFLKDNREKIEKILTFRIPYYVGPLARGNSRFAWMTRKSEETITPWNFEEVVDKGASAQSFIERMTNFDKNLPNEKVLPKHSLLYEYFTVYNELTKVKYVTEGMRKPAFLSGEQKKAIVDLLFKTNRKVTVKQLKEDYFKKIECFDSVEISGVEDRFNASLGTYHDLLKIIKDKDFLDNEENEDILEDIVLTLTLFEDREMIEERLKTYAHLFDDKVMKQLKRRRYTGWGRLSRKLINGIRDKQSGKTILDFLKSDGFANRNFMQLIHDDSLTFKEDIQKAQVSGQGDSLHEHIANLAGSPAIKKGILQTVKVVDELVKVMGRHKPENIVIEMARENQTTQKGQKNSRERMKRIEEGIKELGSQILKEHPVENTQLQNEKLYLYYLQNGRDMYVDQELDINRLSDYDVDHIVPQSFLKDDSIDNKVLTRSDKARGKSDNVPSEEVVKKMKNYWRQLLNAKLITQRKFDNLTKAERGGLSELDKAGFIKRQLVETRQITKHVAQILDSRMNTKYDENDKLIREVKVITLKSKLVSDFRKDFQFYKVREINNYHHAHDAYLNAVVGTALIKKYPKLESEFVYGDYKVYDVRKMIAKSEQEIGKATAKYFFYSNIMNFFKTEITLANGEIRKRPLIETNGETGEIVWDKGRDFATVRKVLSMPQVNIVKKTEVQTGGFSKESILPKRNSDKLIARKKDWDPKKYGGFDSPTVAYSVLVVAKVEKGKSKKLKSVKELLGITIMERSSFEKNPIDFLEAKGYKEVKKDLIIKLPKYSLFELENGRKRMLASAGELQKGNELALPSKYVNFLYLASHYEKLKGSPEDNEQKQLFVEQHKHYLDEIIEQISEFSKRVILADANLDKVLSAYNKHRDKPIREQAENIIHLFTLTNLGAPAAFKYFDTTIDRKRYTSTKEVLDATLIHQSITGLYETRIDLSQLGGDGGGSSPAPGGSGGTAPLEEEYRLFLEAPIQNVTLLEQWKREIPKVWAEINPPGLASTQAPIHVQLLSTALPVRVRQYPITLEAKRSLRETIRKFRAAGILRPVHSPWNTPLLPVRKSGTSEYRMVQDLREVNKRVETIHPTVPNPYTLLSLLPPDRIWYSVLDLKDAFFCIPLAPESQLIFAFEWADAEEGESGQLTWTRLPQGFKNSPTLFNEALNRDLQGFRLDHPSVSLLQYVDDLLIAADTQAACLSATRDLLMTLAELGYRVSGKKAQLCQEEVTYLGFKIHKGSRSLSNSRTQAILQIPVPKTKRQVREFLGKIGYCRLFIPGFAELAQPLYAATRPGNDPLVWGEKEEEAFQSLKLALTQPPALALPSLDKPFQLFVEETSGAAKGVLTQALGPWKRPVAYLSKRLDPVAAGWPRCLRAIAAAALLTREASKLTFGQDIEITSSHNLESLLRSPPDKWLTNARITQYQVLLLDPPRVRFKQTAALNPATLLPETDDTLPIHHCLDTLDSLTSTRPDLTDQPLAQAEATLFTDGSSYIRDGKRYAGAAVVTLDSVIWAEPLPIGTSAQKAELIALTKALEWSKDKSVNIYTDSRYAFATLHVHGMIYRERGWLTAGGKAIKNAPEILALLTAVWLPKRVAVMHCKGHQKDDAPTSTGNRRADEVAREVAIRPLSTQATISAGKRTADGSEFEKRTADGSEFESPKKKAKVE

SEQ ID NO: 7153 - protein, 2093 aa, synthetic construct
MPAAKRVKLDGGDKKYSIGLDIGTNSVGWAVITDEYKVPSKKFKVLGNTDRHSIKKNLIGALLFDSGETAEATRLKRTARRRYTRRKNRICYLQEIFSNEMAKVDDSFFHRLEESFLVEEDKKHERHPIFGNIVDEVAYHEKYPTIYHLRKKLVDSTDKADLRLIYLALAHMIKFRGHFLIEGDLNPDNSDVDKLFIQLVQTYNQLFEENPINASGVDAKAILSARLSKSRRLENLIAQLPGEKKNGLFGNLIALSLGLTPNFKSNFDLAEDAKLQLSKDTYDDDLDNLLAQIGDQYADLFLAAKNLSDAILLSDILRVNTEITKAPLSASMIKRYDEHHQDLTLLKALVRQQLPEKYKEIFFDQSKNGYAGYIDGGASQEEFYKFIKPILEKMDGTEELLVKLNREDLLRKQRTFDNGSIPHQIHLGELHAILRRQEDFYPFLKDNREKIEKILTFRIPYYVGPLARGNSRFAWMTRKSEETITPWNFEEVVDKGASAQSFIERMTNFDKNLPNEKVLPKHSLLYEYFTVYNELTKVKYVTEGMRKPAFLSGEQKKAIVDLLFKTNRKVTVKQLKEDYFKKIECFDSVEISGVEDRFNASLGTYHDLLKIIKDKDFLDNEENEDILEDIVLTLTLFEDREMIEERLKTYAHLFDDKVMKQLKRRRYTGWGRLSRKLINGIRDKQSGKTILDFLKSDGFANRNFMQLIHDDSLTFKEDIQKAQVSGQGDSLHEHIANLAGSPAIKKGILQTVKVVDELVKVMGRHKPENIVIEMARENQTTQKGQKNSRERMKRIEEGIKELGSQILKEHPVENTQLQNEKLYLYYLQNGRDMYVDQELDINRLSDYDVDHIVPQSFLKDDSIDNKVLTRSDKARGKSDNVPSEEVVKKMKNYWRQLLNAKLITQRKFDNLTKAERGGLSELDKAGFIKRQLVETRQITKHVAQILDSRMNTKYDENDKLIREVKVITLKSKLVSDFRKDFQFYKVREINNYHHAHDAYLNAVVGTALIKKYPKLESEFVYGDYKVYDVRKMIAKSEQEIGKATAKYFFYSNIMNFFKTEITLANGEIRKRPLIETNGETGEIVWDKGRDFATVRKVLSMPQVNIVKKTEVQTGGFSKESILPKRNSDKLIARKKDWDPKKYGGFDSPTVAYSVLVVAKVEKGKSKKLKSVKELLGITIMERSSFEKNPIDFLEAKGYKEVKKDLIIKLPKYSLFELENGRKRMLASAGELQKGNELALPSKYVNFLYLASHYEKLKGSPEDNEQKQLFVEQHKHYLDEIIEQISEFSKRVILADANLDKVLSAYNKHRDKPIREQAENIIHLFTLTNLGAPAAFKYFDTTIDRKRYTSTKEVLDATLIHQSITGLYETRIDLSQLGGDGGGSSPAPGGSGGTLQLEEEYRLFEPESTQKQEMDIWLKNFPQAWAETGGMGTAHCQAPVLIQLKATATPISIRQYPMPHEAYQGIKPHIRRMLDQGILKPCQSPWNTPLLPVKKPGTEDYRPVQDLREVNKRVEDIHPTVPNPYNLLSTLPPSHPWYTVLDLKDAFFCLRLHSESQLLFAFEWRDPEIGLSGQLTWTRLPQGFKNSPTLFNEALHSDLADFRVRYPALVLLQYVDDLLLAAATRTECLEGTKALLETLGNKGYRASAKKAQICLQEVTYLGYSLKDGQRWLTKARKEAILSIPVPKNSRQVREFLGKAGYCRLFIPGFAELAAPLYPLTRPGTLFQWGTEQQLAFEDIKKALLSSPALGLPDITKPFELFIDENSGFAKGVLVQKLGPWKRPVAYLSKKLDTVASGWPPCLRMVAAIAILVKDAGKLTLGQPLTILTSHPVEALVRQPPNKWLSNARMTHYQAMLLDAERVHFGPTVSLNPATLLPLPSGGNHHDCLQILAETHGTRPDLTDQPLPDADLTWYTDGSSFIRNGEREAGAAVTTESEVIWAAPLPPGTSAQRAELIALTQALKMAEGKKLTVYTDSRYAFATTHVHGEIYRRRGWLTSEGKEIKNKNEILALLEALFLPKRLSIIHCPGHQKGDSPQAKGNRLADDTAKKAATETHSSLTVLPAGKRTADGSEFEKRTADGSEFESPKKKAKVE

SEQ ID NO: 7154 - protein, 2125 aa, synthetic construct; identical to SEQ ID NO: 4526

SEQ ID NO: 7155 - protein, 2216 aa, synthetic construct
MPAAKRVKLDGGDKKYSIGLDIGTNSVGWAVITDEYKVPSKKFKVLGNTDRHSIKKNLIGALLFDSGETAEATRLKRTARRRYTRRKNRICYLQEIFSNEMAKVDDSFFHRLEESFLVEEDKKHERHPIFGNIVDEVAYHEKYPTIYHLRKKLVDSTDKADLRLIYLALAHMIKFRGHFLIEGDLNPDNSDVDKLFIQLVQTYNQLFEENPINASGVDAKAILSARLSKSRRLENLIAQLPGEKKNGLFGNLIALSLGLTPNFKSNFDLAEDAKLQLSKDTYDDDLDNLLAQIGDQYADLFLAAKNLSDAILLSDILRVNTEITKAPLSASMIKRYDEHHQDLTLLKALVRQQLPEKYKEIFFDQSKNGYAGYIDGGASQEEFYKFIKPILEKMDGTEELLVKLNREDLLRKQRTFDNGSIPHQIHLGELHAILRRQEDFYPFLKDNREKIEKILTFRIPYYVGPLARGNSRFAWMTRKSEETITPWNFEEVVDKGASAQSFIERMTNFDKNLPNEKVLPKHSLLYEYFTVYNELTKVKYVTEGMRKPAFLSGEQKKAIVDLLFKTNRKVTVKQLKEDYFKKIECFDSVEISGVEDRFNASLGTYHDLLKIIKDKDFLDNEENEDILEDIVLTLTLFEDREMIEERLKTYAHLFDDKVMKQLKRRRYTGWGRLSRKLINGIRDKQSGKTILDFLKSDGFANRNFMQLIHDDSLTFKEDIQKAQVSGQGDSLHEHIANLAGSPAIKKGILQTVKVVDELVKVMGRHKPENIVIEMARENQTTQKGQKNSRERMKRIEEGIKELGSQILKEHPVENTQLQNEKLYLYYLQNGRDMYVDQELDINRLSDYDVDHIVPQSFLKDDSIDNKVLTRSDKARGKSDNVPSEEVVKKMKNYWRQLLNAKLITQRKFDNLTKAERGGLSELDKAGFIKRQLVETRQITKHVAQILDSRMNTKYDENDKLIREVKVITLKSKLVSDFRKDFQFYKVREINNYHHAHDAYLNAVVGTALIKKYPKLESEFVYGDYKVYDVRKMIAKSEQEIGKATAKYFFYSNIMNFFKTEITLANGEIRKRPLIETNGETGEIVWDKGRDFATVRKVLSMPQVNIVKKTEVQTGGFSKESILPKRNSDKLIARKKDWDPKKYGGFDSPTVAYSVLVVAKVEKGKSKKLKSVKELLGITIMERSSFEKNPIDFLEAKGYKEVKKDLIIKLPKYSLFELENGRKRMLASAGELQKGNELALPSKYVNFLYLASHYEKLKGSPEDNEQKQLFVEQHKHYLDEIIEQISEFSKRVILADANLDKVLSAYNKHRDKPIREQAENIIHLFTLTNLGAPAAFKYFDTTIDRKRYTSTKEVLDATLIHQSITGLYETRIDLSQLGGDGGGSSPAPGGSGGTLGDQGSRGSDPLPEPRVTLTVEGIPTEFLVNTGAEHSVLTKPMGKMGSKRTVVAGATGSKVYPWTTKRLLKIGQKQVTHSFLVIPECPAPLLGRDLLTKLKAQIQFSTEGPQVTWEDRPAMCLVLNLEEEYRLHEKPVPPSIDPSWLQLFPMVWAEKAGMGLANQVPPVVVELKSDASPVAVRQYPMSKEAREGIRPHIQRFLDLGILVPCQSPWNTPLLPVKKPGTNDYRPVQDLREVNKRVQDIHPTVPNPYNLLSSLPPSHTWYSVLDLKDAFFCLKLHPNSQPLFAFEWRDPEKGNTGQLTWTRLPQGFKNSPTLFNEALHRDLASFRALNPQVVMLQYVDDLLVAAPTYRDCKEGTRRLLQELSKLGYRVSAKKAQLCREEVTYLGYLLKGGKRWLTPARKATVMKIPTPTTPRQVREFLGTAGFCRLWIPGFASLAAPLYPLTRPKVPFTWTEAHQEAFGRIKEALLSAPALALPDLTKPFALYVDEKEGVARGVLTQTLGPWRRPVAYLSKKLDPVASGWPTCLKAIAAVALLLKDADKLTLGQNVLVIAPHNLESIVRQPPDRWMTNARMTHYQSLLLNERVSFAPPAILNPATLLPVESDDTPIHICSEILAEETGTRPDLRDQPLPGVPAWYTDGSSFIMDGRRQAGAAIVDNKRTVWASNLPEGTSAQKAELIALTQALRLAEGKSINIYTDSRYAFATAHVHGAIYKQRGWLTSAGKDIKNKEEILALLEAIHLPKRVAIIHCPGHQRGTDPVATGNRKADEAAKQAAQSTRILTETTKNAGKRTADGSEFEKRTADGSEFESPKKKAKVE

SEQ ID NO: 7156 - protein, 2094 aa, synthetic construct
MPAAKRVKLDGGDKKYSIGLDIGTNSVGWAVITDEYKVPSKKFKVLGNTDRHSIKKNLIGALLFDSGETAEATRLKRTARRRYTRRKNRICYLQEIFSNEMAKVDDSFFHRLEESFLVEEDKKHERHPIFGNIVDEVAYHEKYPTIYHLRKKLVDSTDKADLRLIYLALAHMIKFRGHFLIEGDLNPDNSDVDKLFIQLVQTYNQLFEENPINASGVDAKAILSARLSKSRRLENLIAQLPGEKKNGLFGNLIALSLGLTPNFKSNFDLAEDAKLQLSKDTYDDDLDNLLAQIGDQYADLFLAAKNLSDAILLSDILRVNTEITKAPLSASMIKRYDEHHQDLTLLKALVRQQLPEKYKEIFFDQSKNGYAGYIDGGASQEEFYKFIKPILEKMDGTEELLVKLNREDLLRKQRTFDNGSIPHQIHLGELHAILRRQEDFYPFLKDNREKIEKILTFRIPYYVGPLARGNSRFAWMTRKSEETITPWNFEEVVDKGASAQSFIERMTNFDKNLPNEKVLPKHSLLYEYFTVYNELTKVKYVTEGMRKPAFLSGEQKKAIVDLLFKTNRKVTVKQLKEDYFKKIECFDSVEISGVEDRFNASLGTYHDLLKIIKDKDFLDNEENEDILEDIVLTLTLFEDREMIEERLKTYAHLFDDKVMKQLKRRRYTGWGRLSRKLINGIRDKQSGKTILDFLKSDGFANRNFMQLIHDDSLTFKEDIQKAQVSGQGDSLHEHIANLAGSPAIKKGILQTVKVVDELVKVMGRHKPENIVIEMARENQTTQKGQKNSRERMKRIEEGIKELGSQILKEHPVENTQLQNEKLYLYYLQNGRDMYVDQELDINRLSDYDVDHIVPQSFLKDDSIDNKVLTRSDKARGKSDNVPSEEVVKKMKNYWRQLLNAKLITQRKFDNLTKAERGGLSELDKAGFIKRQLVETRQITKHVAQILDSRMNTKYDENDKLIREVKVITLKSKLVSDFRKDFQFYKVREINNYHHAHDAYLNAVVGTALIKKYPKLESEFVYGDYKVYDVRKMIAKSEQEIGKATAKYFFYSNIMNFFKTEITLANGEIRKRPLIETNGETGEIVWDKGRDFATVRKVLSMPQVNIVKKTEVQTGGFSKESILPKRNSDKLIARKKDWDPKKYGGFDSPTVAYSVLVVAKVEKGKSKKLKSVKELLGITIMERSSFEKNPIDFLEAKGYKEVKKDLIIKLPKYSLFELENGRKRMLASAGELQKGNELALPSKYVNFLYLASHYEKLKGSPEDNEQKQLFVEQHKHYLDEIIEQISEFSKRVILADANLDKVLSAYNKHRDKPIREQAENIIHLFTLTNLGAPAAFKYFDTTIDRKRYTSTKEVLDATLIHQSITGLYETRIDLSQLGGDGGGSSPAPGGSGGTLNLEDEYRLYETSAEPEVSPGSTWLSDFPQAWAETGGMGLAVRQAPLIIPLKATSTPVSIKQYPMSQEAKLGIKPHIQRLLDQGILVPCQSPWNTPLLPVKKPGTNDYRPVQDLREVNKRVEDIHPTVPNPYNLLSGLPPSHRWYTVLDLKDAFFCLRLHPTSQPLFAFEWRDPGMGISGQLTWTRLPQGFKNSPTLFNEALHRDLADFRIQHPDLILLQYVDDILLAATSELDCQQGTRALLLTLGNLGYRASAKKAQLCQKQVKYLGYLLKEGQRWLTEARKETVMGQPTPKTPRQLREFLGKAGFCRLFIPGFAEMAAPLYPLTKPGTLFNWGPDQQKAYQEIKQALLTAPALGLPDLTKPFELFVDEKQGYAKGVLTQKLGPWRRPVAYLSKKLDPVAAGWPPCLRMVAAIAVLRKDAGKLTMGQPLVILAPHAVEALVKQPPDRWLSNARMTHYQAMLLDTDRVQFGPVVALNPATLLPLPEEGAPHDCLEILAETHGTRPDLTDQPIPDADHTWYTDGSSFLQEGQRKAGAAVTTETEVIWARALPAGTSAQRAELIALTQALKMAEGKRLNVYTDSRYAFATAHIHGEIYRRRGWLTSEGREIKNKSEILALLKALFLPKRLSIIHCLGHQKGDSAEARGNRLADQAAREAAIKTPPDTSTLLAGKRTADGSEFEKRTADGSEFESPKKKAKVE

SEQ ID NO: 7157 - protein, 2094 aa, synthetic construct
MPAAKRVKLDGGDKKYSIGLDIGTNSVGWAVITDEYKVPSKKFKVLGNTDRHSIKKNLIGALLFDSGETAEATRLKRTARRRYTRRKNRICYLQEIFSNEMAKVDDSFFHRLEESFLVEEDKKHERHPIFGNIVDEVAYHEKYPTIYHLRKKLVDSTDKADLRLIYLALAHMIKFRGHFLIEGDLNPDNSDVDKLFIQLVQTYNQLFEENPINASGVDAKAILSARLSKSRRLENLIAQLPGEKKNGLFGNLIALSLGLTPNFKSNFDLAEDAKLQLSKDTYDDDLDNLLAQIGDQYADLFLAAKNLSDAILLSDILRVNTEITKAPLSASMIKRYDEHHQDLTLLKALVRQQLPEKYKEIFFDQSKNGYAGYIDGGASQEEFYKFIKPILEKMDGTEELLVKLNREDLLRKQRTFDNGSIPHQIHLGELHAILRRQEDFYPFLKDNREKIEKILTFRIPYYVGPLARGNSRFAWMTRKSEETITPWNFEEVVDKGASAQSFIERMTNFDKNLPNEKVLPKHSLLYEYFTVYNELTKVKYVTEGMRKPAFLSGEQKKAIVDLLFKTNRKVTVKQLKEDYFKKIECFDSVEISGVEDRFNASLGTYHDLLKIIKDKDFLDNEENEDILEDIVLTLTLFEDREMIEERLKTYAHLFDDKVMKQLKRRRYTGWGRLSRKLINGIRDKQSGKTILDFLKSDGFANRNFMQLIHDDSLTFKEDIQKAQVSGQGDSLHEHIANLAGSPAIKKGILQTVKVVDELVKVMGRHKPENIVIEMARENQTTQKGQKNSRERMKRIEEGIKELGSQILKEHPVENTQLQNEKLYLYYLQNGRDMYVDQELDINRLSDYDVDHIVPQSFLKDDSIDNKVLTRSDKARGKSDNVPSEEVVKKMKNYWRQLLNAKLITQRKFDNLTKAERGGLSELDKAGFIKRQLVETRQITKHVAQILDSRMNTKYDENDKLIREVKVITLKSKLVSDFRKDFQFYKVREINNYHHAHDAYLNAVVGTALIKKYPKLESEFVYGDYKVYDVRKMIAKSEQEIGKATAKYFFYSNIMNFFKTEITLANGEIRKRPLIETNGETGEIVWDKGRDFATVRKVLSMPQVNIVKKTEVQTGGFSKESILPKRNSDKLIARKKDWDPKKYGGFDSPTVAYSVLVVAKVEKGKSKKLKSVKELLGITIMERSSFEKNPIDFLEAKGYKEVKKDLIIKLPKYSLFELENGRKRMLASAGELQKGNELALPSKYVNFLYLASHYEKLKGSPEDNEQKQLFVEQHKHYLDEIIEQISEFSKRVILADANLDKVLSAYNKHRDKPIREQAENIIHLFTLTNLGAPAAFKYFDTTIDRKRYTSTKEVLDATLIHQSITGLYETRIDLSQLGGDGGGSSPAPGGSGGTLNIEDEHRLHETSKEPDVSLGSTWLSDFPQAWAETGGMGLAVRQAPLIIPLKATSTPVSIKQYPMSQEARLGIKPHIQRLLDQGILVPCQSPWNTPLLPVKKPGTNDYRPVQDLREVNKRVEDIHPTVPNPYNLLSGLPPSHQWYTVLDLKDAFFCLRLHPTSQPLFAFEWRDPEMGISGQLTWTRLPQGFKNSPTLFNEALHRDLADFRIQHPDLILLQYVDDLLLAATSELDCQQGTRALLQTLGNLGYRASAKKAQICQKQVKYLGYLLKEGQRWLTEARKETVMGQPTPKTPRQLREFLGTAGFCRLWIPGFAEMAAPLYPLTKPGTLFNWGPDQQKAYQEIKQALLTAPALGLPDLTKPFELFVDEKQGYAKGVLTQKLGPWRRPVAYLSKKLDPVAAGWPPCLRMVAAIAVLTKDAGKLTMGQPLVILAPHAVEALVKQPPDRWLSNARMTHYQALLLDTDRVQFGPVVALNPATLLPLPEEGLQHNCLDILAEAHGTRPDLTDQPLPDADHTWYTDGSSLLQEGQRKAGAAVTTETEVIWAKALPAGTSAQRAELIALTQALKMAEGKKLNVYTDSRYAFATAHIHGEIYRRRGWLTSEGKEIKNKDEILALLKALFLPKRLSIIHCPGHQKGHSAEARGNRMADQAARKAAITETPDTSTLLAGKRTADGSEFEKRTADGSEFESPKKKAKVE

SEQ ID NO: 7158 - protein, 2094 aa, synthetic construct
MPAAKRVKLDGGDKKYSIGLDIGTNSVGWAVITDEYKVPSKKFKVLGNTDRHSIKKNLIGALLFDSGETAEATRLKRTARRRYTRRKNRICYLQEIFSNEMAKVDDSFFHRLEESFLVEEDKKHERHPIFGNIVDEVAYHEKYPTIYHLRKKLVDSTDKADLRLIYLALAHMIKFRGHFLIEGDLNPDNSDVDKLFIQLVQTYNQLFEENPINASGVDAKAILSARLSKSRRLENLIAQLPGEKKNGLFGNLIALSLGLTPNFKSNFDLAEDAKLQLSKDTYDDDLDNLLAQIGDQYADLFLAAKNLSDAILLSDILRVNTEITKAPLSASMIKRYDEHHQDLTLLKALVRQQLPEKYKEIFFDQSKNGYAGYIDGGASQEEFYKFIKPILEKMDGTEELLVKLNREDLLRKQRTFDNGSIPHQIHLGELHAILRRQEDFYPFLKDNREKIEKILTFRIPYYVGPLARGNSRFAWMTRKSEETITPWNFEEVVDKGASAQSFIERMTNFDKNLPNEKVLPKHSLLYEYFTVYNELTKVKYVTEGMRKPAFLSGEQKKAIVDLLFKTNRKVTVKQLKEDYFKKIECFDSVEISGVEDRFNASLGTYHDLLKIIKDKDFLDNEENEDILEDIVLTLTLFEDREMIEERLKTYAHLFDDKVMKQLKRRRYTGWGRLSRKLINGIRDKQSGKTILDFLKSDGFANRNFMQLIHDDSLTFKEDIQKAQVSGQGDSLHEHIANLAGSPAIKKGILQTVKVVDELVKVMGRHKPENIVIEMARENQTTQKGQKNSRERMKRIEEGIKELGSQILKEHPVENTQLQNEKLYLYYLQNGRDMYVDQELDINRLSDYDVDHIVPQSFLKDDSIDNKVLTRSDKARGKSDNVPSEEVVKKMKNYWRQLLNAKLITQRKFDNLTKAERGGLSELDKAGFIKRQLVETRQITKHVAQILDSRMNTKYDENDKLIREVKVITLKSKLVSDFRKDFQFYKVREINNYHHAHDAYLNAVVGTALIKKYPKLESEFVYGDYKVYDVRKMIAKSEQEIGKATAKYFFYSNIMNFFKTEITLANGEIRKRPLIETNGETGEIVWDKGRDFATVRKVLSMPQVNIVKKTEVQTGGFSKESILPKRNSDKLIARKKDWDPKKYGGFDSPTVAYSVLVVAKVEKGKSKKLKSVKELLGITIMERSSFEKNPIDFLEAKGYKEVKKDLIIKLPKYSLFELENGRKRMLASAGELQKGNELALPSKYVNFLYLASHYEKLKGSPEDNEQKQLFVEQHKHYLDEIIEQISEFSKRVILADANLDKVLSAYNKHRDKPIREQAENIIHLFTLTNLGAPAAFKYFDTTIDRKRYTSTKEVLDATLIHQSITGLYETRIDLSQLGGDGGGSSPAPGGSGGTLNIEDEHRLHETSKEPDVSLGSTWLSDFPQAWAETGGMGLAVRQAPLIIPLKATSTPVSIKQYPMSQEARLGIKPHIQRLLDQGILVPCQSPWNTPLLPVKKPGTNDYRPVQDLREVNKRVEDIHPTVPNPYNLLSGLPPSHQWYTVLDLKDAFFCLRLHPTSQPLFAFEWRDPEMGISGQLTWTRLPQGFKNSPTLFNEALHRDLADFRIQHPDLILLQYVDDLLLAATSELDCQQGTRALLQTLGNLGYRASAKKAQICQKQVKYLGYLLKEGQRWLTEARKETVMGQPTPKTPRQLREFLGKAGFCRLFIPGFAEMAAPLYPLTKPGTLFNWGPDQQKAYQEIKQALLTAPALGLPDLTKPFELFVDEKQGYAKGVLTQKLGPWRRPVAYLSKKLDPVAAGWPPCLRMVAAIAVLTKDAGKLTMGQPLVILAPHAVEALVKQPPDRWLSNARMTHYQALLLDTDRVQFGPVVALNPATLLPLPEEGLQHNCLDILAEAHGTRPDLTDQPLPDADHTWYTDGSSLLQEGQRKAGAAVTTETEVIWAKALPAGTSAQRAELIALTQALKMAEGKKLNVYTDSRYAFATAHIHGEIYRRRGWLTSEGKEIKNKDEILALLKALFLPKRLSIIHCPGHQKGHSAEARGNRMADQAARKAAITETPDTSTLLAGKRTADGSEFEKRTADGSEFESPKKKAKVE

SEQ ID NO: 7159 - protein, 2094 aa, synthetic construct; identical to SEQ ID NO: 7157

SEQ ID NO: 7160 - protein, 2094 aa, synthetic construct; identical to SEQ ID NO: 7158

SEQ ID NO: 7161 - protein, 2085 aa, synthetic construct
MPAAKRVKLDGGDKKYSIGLDIGTNSVGWAVITDEYKVPSKKFKVLGNTDRHSIKKNLIGALLFDSGETAEATRLKRTARRRYTRRKNRICYLQEIFSNEMAKVDDSFFHRLEESFLVEEDKKHERHPIFGNIVDEVAYHEKYPTIYHLRKKLVDSTDKADLRLIYLALAHMIKFRGHFLIEGDLNPDNSDVDKLFIQLVQTYNQLFEENPINASGVDAKAILSARLSKSRRLENLIAQLPGEKKNGLFGNLIALSLGLTPNFKSNFDLAEDAKLQLSKDTYDDDLDNLLAQIGDQYADLFLAAKNLSDAILLSDILRVNTEITKAPLSASMIKRYDEHHQDLTLLKALVRQQLPEKYKEIFFDQSKNGYAGYIDGGASQEEFYKFIKPILEKMDGTEELLVKLNREDLLRKQRTFDNGSIPHQIHLGELHAILRRQEDFYPFLKDNREKIEKILTFRIPYYVGPLARGNSRFAWMTRKSEETITPWNFEEVVDKGASAQSFIERMTNFDKNLPNEKVLPKHSLLYEYFTVYNELTKVKYVTEGMRKPAFLSGEQKKAIVDLLFKTNRKVTVKQLKEDYFKKIECFDSVEISGVEDRFNASLGTYHDLLKIIKDKDFLDNEENEDILEDIVLTLTLFEDREMIEERLKTYAHLFDDKVMKQLKRRRYTGWGRLSRKLINGIRDKQSGKTILDFLKSDGFANRNFMQLIHDDSLTFKEDIQKAQVSGQGDSLHEHIANLAGSPAIKKGILQTVKVVDELVKVMGRHKPENIVIEMARENQTTQKGQKNSRERMKRIEEGIKELGSQILKEHPVENTQLQNEKLYLYYLQNGRDMYVDQELDINRLSDYDVDHIVPQSFLKDDSIDNKVLTRSDKARGKSDNVPSEEVVKKMKNYWRQLLNAKLITQRKFDNLTKAERGGLSELDKAGFIKRQLVETRQITKHVAQILDSRMNTKYDENDKLIREVKVITLKSKLVSDFRKDFQFYKVREINNYHHAHDAYLNAVVGTALIKKYPKLESEFVYGDYKVYDVRKMIAKSEQEIGKATAKYFFYSNIMNFFKTEITLANGEIRKRPLIETNGETGEIVWDKGRDFATVRKVLSMPQVNIVKKTEVQTGGFSKESILPKRNSDKLIARKKDWDPKKYGGFDSPTVAYSVLVVAKVEKGKSKKLKSVKELLGITIMERSSFEKNPIDFLEAKGYKEVKKDLIIKLPKYSLFELENGRKRMLASAGELQKGNELALPSKYVNFLYLASHYEKLKGSPEDNEQKQLFVEQHKHYLDEIIEQISEFSKRVILADANLDKVLSAYNKHRDKPIREQAENIIHLFTLTNLGAPAAFKYFDTTIDRKRYTSTKEVLDATLIHQSITGLYETRIDLSQLGGDGGGSSPAPGGSGGIPWLMKKPLQLTTLVPLQEYEERLLKQTMLTGSYKEKLQSLFLKYDALWQHWENQVGHRRIKPHHIATGTVNPRPQKQYPINPKAKASIQTVINDLLKQGVLIQQNSIMNTPVYPVPKPDGKWRMVLDYREVNKTIPLIAAQNQHSAGILSSIFRGKYKTTLDLSNGFWAHSITPESYWLTAFTWLGQQYCWTRLPQGFLNSPALFNADVVDLLKEVPNVQVYVDDIYISHDDPREHLEQLEKVFSLLLNAGYVVSLKKSEIAQHEVEFLGFNITKEGRGLTETFKQKLLNITPPRDLKQLQSILGKLNFARNFIPNFSELVKPLYNIIATAPGKYITWTTDNSQQLQNIISMLNSAENLEERNPEVRLIMKVNTSPSAGYIRFYNEFAKRPIMYLNYVYTKAEVKFTNTEKLLTTIHKGLIKALDLGMGQEILVYSPIVSMTKIQKTPLPERKALPIRWITWMSYLEDPRIQFHYDKTLPELQQVPTVTDDIIAKIKHPSEFSMVFYTDGSAIKHPNVNKSHNAGMGIAQVQFKPEFTVINTWSIPLGDHTAQLAEVAAVEFACKKALKIDGPVLIVTDSFYVAESVNKELPYWQSNGFFNNKKKPLKHVSKWKSIADCIQLKPDIIIIHEKGHQPTASTFHTEGNNLADKLATQGSYVVNAGKRTADGSEFEKRTADGSEFESPKKKAKVE

SEQ ID NO: 7162 - protein, 2092 aa, synthetic construct
MPAAKRVKLDGGDKKYSIGLDIGTNSVGWAVITDEYKVPSKKFKVLGNTDRHSIKKNLIGALLFDSGETAEATRLKRTARRRYTRRKNRICYLQEIFSNEMAKVDDSFFHRLEESFLVEEDKKHERHPIFGNIVDEVAYHEKYPTIYHLRKKLVDSTDKADLRLIYLALAHMIKFRGHFLIEGDLNPDNSDVDKLFIQLVQTYNQLFEENPINASGVDAKAILSARLSKSRRLENLIAQLPGEKKNGLFGNLIALSLGLTPNFKSNFDLAEDAKLQLSKDTYDDDLDNLLAQIGDQYADLFLAAKNLSDAILLSDILRVNTEITKAPLSASMIKRYDEHHQDLTLLKALVRQQLPEKYKEIFFDQSKNGYAGYIDGGASQEEFYKFIKPILEKMDGTEELLVKLNREDLLRKQRTFDNGSIPHQIHLGELHAILRRQEDFYPFLKDNREKIEKILTFRIPYYVGPLARGNSRFAWMTRKSEETITPWNFEEVVDKGASAQSFIERMTNFDKNLPNEKVLPKHSLLYEYFTVYNELTKVKYVTEGMRKPAFLSGEQKKAIVDLLFKTNRKVTVKQLKEDYFKKIECFDSVEISGVEDRFNASLGTYHDLLKIIKDKDFLDNEENEDILEDIVLTLTLFEDREMIEERLKTYAHLFDDKVMKQLKRRRYTGWGRLSRKLINGIRDKQSGKTILDFLKSDGFANRNFMQLIHDDSLTFKEDIQKAQVSGQGDSLHEHIANLAGSPAIKKGILQTVKVVDELVKVMGRHKPENIVIEMARENQTTQKGQKNSRERMKRIEEGIKELGSQILKEHPVENTQLQNEKLYLYYLQNGRDMYVDQELDINRLSDYDVDHIVPQSFLKDDSIDNKVLTRSDKARGKSDNVPSEEVVKKMKNYWRQLLNAKLITQRKFDNLTKAERGGLSELDKAGFIKRQLVETRQITKHVAQILDSRMNTKYDENDKLIREVKVITLKSKLVSDFRKDFQFYKVREINNYHHAHDAYLNAVVGTALIKKYPKLESEFVYGDYKVYDVRKMIAKSEQEIGKATAKYFFYSNIMNFFKTEITLANGEIRKRPLIETNGETGEIVWDKGRDFATVRKVLSMPQVNIVKKTEVQTGGFSKESILPKRNSDKLIARKKDWDPKKYGGFDSPTVAYSVLVVAKVEKGKSKKLKSVKELLGITIMERSSFEKNPIDFLEAKGYKEVKKDLIIKLPKYSLFELENGRKRMLASAGELQKGNELALPSKYVNFLYLASHYEKLKGSPEDNEQKQLFVEQHKHYLDEIIEQISEFSKRVILADANLDKVLSAYNKHRDKPIREQAENIIHLFTLTNLGAPAAFKYFDTTIDRKRYTSTKEVLDATLIHQSITGLYETRIDLSQLGGDGGGSSPAPGGSGGVLNLEEEYRLHEKPVPSSIDPSWLQLFPTVWAERAGMGLANQVPPVVVELRSGASPVAVRQYPMSKEAREGIRPHIQRFLDLGVLVPCQSPWNTPLLPVKKPGTNDYRPVQDLREINKRVQDIHPTVPNPYNLLSSLPPSHTWYSVLDLKDAFFCLKLHPNSQPLFAFEWRDPEKGNTGQLTWTRLPQGFKNSPTLFNEALHRDLAPFRALNPQVVLLQYVDDLLVAAPTYRDCKEGTQKLLQELSKLGYRVSAKKAQLCQKEVTYLGYLLKEGKRWLTPARKATVMKIPPPTTPRQVREFLGKAGFCRLFIPGFASLAAPLYPLTKPSIPFIWTEEHQKAFDRIKEALLSAPALALPDLTKPFTLYVDERAGVARGVLTQTLGPWRRPVAYLSKKLDPVASGWPTCLKAVAAVALLLKDADKLTLGQNVTVIASHSLESIVRQPPDRWMTNARMTHYQSLLLNERVSFAPPAVLNPATLLPVESEATPVHRCSEILAEETGTRRDLKDQPLPGVPAWYTDGSSFIAEGKRRAGAAIVDGKRTVWASSLPEGTSAQKAELVALTQALRLAEGKDINIYTDSRYAFATAHIHGAIYKQRGWLTSAGKDIKNKEEILALLEAIHLPKRVAIIHCPGHQKGNDPVATGNRRADEAAKQAALSTRVLAETTKPAGKRTADGSEFEKRTADGSEFESPKKKAKVE

SEQ ID NO: 7163 - protein, 2096 aa, synthetic construct
MPAAKRVKLDGGDKKYSIGLDIGTNSVGWAVITDEYKVPSKKFKVLGNTDRHSIKKNLIGALLFDSGETAEATRLKRTARRRYTRRKNRICYLQEIFSNEMAKVDDSFFHRLEESFLVEEDKKHERHPIFGNIVDEVAYHEKYPTIYHLRKKLVDSTDKADLRLIYLALAHMIKFRGHFLIEGDLNPDNSDVDKLFIQLVQTYNQLFEENPINASGVDAKAILSARLSKSRRLENLIAQLPGEKKNGLFGNLIALSLGLTPNFKSNFDLAEDAKLQLSKDTYDDDLDNLLAQIGDQYADLFLAAKNLSDAILLSDILRVNTEITKAPLSASMIKRYDEHHQDLTLLKALVRQQLPEKYKEIFFDQSKNGYAGYIDGGASQEEFYKFIKPILEKMDGTEELLVKLNREDLLRKQRTFDNGSIPHQIHLGELHAILRRQEDFYPFLKDNREKIEKILTFRIPYYVGPLARGNSRFAWMTRKSEETITPWNFEEVVDKGASAQSFIERMTNFDKNLPNEKVLPKHSLLYEYFTVYNELTKVKYVTEGMRKPAFLSGEQKKAIVDLLFKTNRKVTVKQLKEDYFKKIECFDSVEISGVEDRFNASLGTYHDLLKIIKDKDFLDNEENEDILEDIVLTLTLFEDREMIEERLKTYAHLFDDKVMKQLKRRRYTGWGRLSRKLINGIRDKQSGKTILDFLKSDGFANRNFMQLIHDDSLTFKEDIQKAQVSGQGDSLHEHIANLAGSPAIKKGILQTVKVVDELVKVMGRHKPENIVIEMARENQTTQKGQKNSRERMKRIEEGIKELGSQILKEHPVENTQLQNEKLYLYYLQNGRDMYVDQELDINRLSDYDVDHIVPQSFLKDDSIDNKVLTRSDKARGKSDNVPSEEVVKKMKNYWRQLLNAKLITQRKFDNLTKAERGGLSELDKAGFIKRQLVETRQITKHVAQILDSRMNTKYDENDKLIREVKVITLKSKLVSDFRKDFQFYKVREINNYHHAHDAYLNAVVGTALIKKYPKLESEFVYGDYKVYDVRKMIAKSEQEIGKATAKYFFYSNIMNFFKTEITLANGEIRKRPLIETNGETGEIVWDKGRDFATVRKVLSMPQVNIVKKTEVQTGGFSKESILPKRNSDKLIARKKDWDPKKYGGFDSPTVAYSVLVVAKVEKGKSKKLKSVKELLGITIMERSSFEKNPIDFLEAKGYKEVKKDLIIKLPKYSLFELENGRKRMLASAGELQKGNELALPSKYVNFLYLASHYEKLKGSPEDNEQKQLFVEQHKHYLDEIIEQISEFSKRVILADANLDKVLSAYNKHRDKPIREQAENIIHLFTLTNLGAPAAFKYFDTTIDRKRYTSTKEVLDATLIHQSITGLYETRIDLSQLGGDGGPAPGGSGSSGGTAPLEEEYRLFLEAPIQNVTLLEQWKREIPKVWAEINPPGLASTQAPIHVQLLSTALPVRVRQYPITLEAKRSLRETIRKFRAAGILRPVHSPWNTPLLPVRKSGTSEYRMVQDLREVNKRVETIHPTVPNPYTLLSLLPPDRIWYSVLDLKDAFFCIPLAPESQLIFAFEWADAEEGESGQLTWTRLPQGFKNSPTLFNEALNRDLQGFRLDHPSVSLLQYVDDLLIAADTQAACLSATRDLLMTLAELGYRVSGKKAQLCQEEVTYLGFKIHKGSRSLSNSRTQAILQIPVPKTKRQVREFLGTIGYCRLWIPGFAELAQPLYAATRPGNDPLVWGEKEEEAFQSLKLALTQPPALALPSLDKPFQLFVEETSGAAKGVLTQALGPWKRPVAYLSKRLDPVAAGWPRCLRAIAAAALLTREASKLTFGQDIEITSSHNLESLLRSPPDKWLTNARITQYQVLLLDPPRVRFKQTAALNPATLLPETDDTLPIHHCLDTLDSLTSTRPDLTDQPLAQAEATLFTDGSSYIRDGKRYAGAAVVTLDSVIWAEPLPIGTSAQKAELIALTKALEWSKDKSVNIYTDSRYAFATLHVHGMIYRERGWLTAGGKAIKNAPEILALLTAVWLPKRVAVMHCKGHQKDDAPTSTGNRRADEVAREVAIRPLSTQATISAGKRTADGSEFEKRTADGSEFESPKKKAKVE

SEQ ID NO: 7164 - protein, 2093 aa, synthetic construct
MPAAKRVKLDGGDKKYSIGLDIGTNSVGWAVITDEYKVPSKKFKVLGNTDRHSIKKNLIGALLFDSGETAEATRLKRTARRRYTRRKNRICYLQEIFSNEMAKVDDSFFHRLEESFLVEEDKKHERHPIFGNIVDEVAYHEKYPTIYHLRKKLVDSTDKADLRLIYLALAHMIKFRGHFLIEGDLNPDNSDVDKLFIQLVQTYNQLFEENPINASGVDAKAILSARLSKSRRLENLIAQLPGEKKNGLFGNLIALSLGLTPNFKSNFDLAEDAKLQLSKDTYDDDLDNLLAQIGDQYADLFLAAKNLSDAILLSDILRVNTEITKAPLSASMIKRYDEHHQDLTLLKALVRQQLPEKYKEIFFDQSKNGYAGYIDGGASQEEFYKFIKPILEKMDGTEELLVKLNREDLLRKQRTFDNGSIPHQIHLGELHAILRRQEDFYPFLKDNREKIEKILTFRIPYYVGPLARGNSRFAWMTRKSEETITPWNFEEVVDKGASAQSFIERMTNFDKNLPNEKVLPKHSLLYEYFTVYNELTKVKYVTEGMRKPAFLSGEQKKAIVDLLFKTNRKVTVKQLKEDYFKKIECFDSVEISGVEDRFNASLGTYHDLLKIIKDKDFLDNEENEDILEDIVLTLTLFEDREMIEERLKTYAHLFDDKVMKQLKRRRYTGWGRLSRKLINGIRDKQSGKTILDFLKSDGFANRNFMQLIHDDSLTFKEDIQKAQVSGQGDSLHEHIANLAGSPAIKKGILQTVKVVDELVKVMGRHKPENIVIEMARENQTTQKGQKNSRERMKRIEEGIKELGSQILKEHPVENTQLQNEKLYLYYLQNGRDMYVDQELDINRLSDYDVDHIVPQSFLKDDSIDNKVLTRSDKARGKSDNVPSEEVVKKMKNYWRQLLNAKLITQRKFDNLTKAERGGLSELDKAGFIKRQLVETRQITKHVAQILDSRMNTKYDENDKLIREVKVITLKSKLVSDFRKDFQFYKVREINNYHHAHDAYLNAVVGTALIKKYPKLESEFVYGDYKVYDVRKMIAKSEQEIGKATAKYFFYSNIMNFFKTEITLANGEIRKRPLIETNGETGEIVWDKGRDFATVRKVLSMPQVNIVKKTEVQTGGFSKESILPKRNSDKLIARKKDWDPKKYGGFDSPTVAYSVLVVAKVEKGKSKKLKSVKELLGITIMERSSFEKNPIDFLEAKGYKEVKKDLIIKLPKYSLFELENGRKRMLASAGELQKGNELALPSKYVNFLYLASHYEKLKGSPEDNEQKQLFVEQHKHYLDEIIEQISEFSKRVILADANLDKVLSAYNKHRDKPIREQAENIIHLFTLTNLGAPAAFKYFDTTIDRKRYTSTKEVLDATLIHQSITGLYETRIDLSQLGGDGGPAPGGSGSSGGTLQLEEEYRLFEPESTQKQEMDIWLKNFPQAWAETGGMGTAHCQAPVLIQLKATATPISIRQYPMPHEAYQGIKPHIRRMLDQGILKPCQSPWNTPLLPVKKPGTEDYRPVQDLREVNKRVEDIHPTVPNPYNLLSTLPPSHPWYTVLDLKDAFFCLRLHSESQLLFAFEWRDPEIGLSGQLTWTRLPQGFKNSPTLFNEALHSDLADFRVRYPALVLLQYVDDLLLAAATRTECLEGTKALLETLGNKGYRASAKKAQICLQEVTYLGYSLKDGQRWLTKARKEAILSIPVPKNSRQVREFLGKAGYCRLFIPGFAELAAPLYPLTRPGTLFQWGTEQQLAFEDIKKALLSSPALGLPDITKPFELFIDENSGFAKGVLVQKLGPWKRPVAYLSKKLDTVASGWPPCLRMVAAIAILVKDAGKLTLGQPLTILTSHPVEALVRQPPNKWLSNARMTHYQAMLLDAERVHFGPTVSLNPATLLPLPSGGNHHDCLQILAETHGTRPDLTDQPLPDADLTWYTDGSSFIRNGEREAGAAVTTESEVIWAAPLPPGTSAQRAELIALTQALKMAEGKKLTVYTDSRYAFATTHVHGEIYRRRGWLTSEGKEIKNKNEILALLEALFLPKRLSIIHCPGHQKGDSPQAKGNRLADDTAKKAATETHSSLTVLPAGKRTADGSEFEKRTADGSEFESPKKKAKVE

SEQ ID NO: 7165 - protein, 2174 aa, synthetic construct
MPAAKRVKLDGGDKKYSIGLDIGTNSVGWAVITDEYKVPSKKFKVLGNTDRHSIKKNLIGALLFDSGETAEATRLKRTARRRYTRRKNRICYLQEIFSNEMAKVDDSFFHRLEESFLVEEDKKHERHPIFGNIVDEVAYHEKYPTIYHLRKKLVDSTDKADLRLIYLALAHMIKFRGHFLIEGDLNPDNSDVDKLFIQLVQTYNQLFEENPINASGVDAKAILSARLSKSRRLENLIAQLPGEKKNGLFGNLIALSLGLTPNFKSNFDLAEDAKLQLSKDTYDDDLDNLLAQIGDQYADLFLAAKNLSDAILLSDILRVNTEITKAPLSASMIKRYDEHHQDLTLLKALVRQQLPEKYKEIFFDQSKNGYAGYIDGGASQEEFYKFIKPILEKMDGTEELLVKLNREDLLRKQRTFDNGSIPHQIHLGELHAILRRQEDFYPFLKDNREKIEKILTFRIPYYVGPLARGNSRFAWMTRKSEETITPWNFEEVVDKGASAQSFIERMTNFDKNLPNEKVLPKHSLLYEYFTVYNELTKVKYVTEGMRKPAFLSGEQKKAIVDLLFKTNRKVTVKQLKEDYFKKIECFDSVEISGVEDRFNASLGTYHDLLKIIKDKDFLDNEENEDILEDIVLTLTLFEDREMIEERLKTYAHLFDDKVMKQLKRRRYTGWGRLSRKLINGIRDKQSGKTILDFLKSDGFANRNFMQLIHDDSLTFKEDIQKAQVSGQGDSLHEHIANLAGSPAIKKGILQTVKVVDELVKVMGRHKPENIVIEMARENQTTQKGQKNSRERMKRIEEGIKELGSQILKEHPVENTQLQNEKLYLYYLQNGRDMYVDQELDINRLSDYDVDHIVPQSFLKDDSIDNKVLTRSDKARGKSDNVPSEEVVKKMKNYWRQLLNAKLITQRKFDNLTKAERGGLSELDKAGFIKRQLVETRQITKHVAQILDSRMNTKYDENDKLIREVKVITLKSKLVSDFRKDFQFYKVREINNYHHAHDAYLNAVVGTALIKKYPKLESEFVYGDYKVYDVRKMIAKSEQEIGKATAKYFFYSNIMNFFKTEITLANGEIRKRPLIETNGETGEIVWDKGRDFATVRKVLSMPQVNIVKKTEVQTGGFSKESILPKRNSDKLIARKKDWDPKKYGGFDSPTVAYSVLVVAKVEKGKSKKLKSVKELLGITIMERSSFEKNPIDFLEAKGYKEVKKDLIIKLPKYSLFELENGRKRMLASAGELQKGNELALPSKYVNFLYLASHYEKLKGSPEDNEQKQLFVEQHKHYLDEIIEQISEFSKRVILADANLDKVLSAYNKHRDKPIREQAENIIHLFTLTNLGAPAAFKYFDTTIDRKRYTSTKEVLDATLIHQSITGLYETRIDLSQLGGDGGPAPGGSGSSGGMNPLQLLQPLPAEIKGTKLLAHWNSGATITCIPESFLEDEQPIKKTLIKTIHGEKQQNVYYVTFKVKGRKVEAEVIASPYEYILLSPTDVPWLTQQPLQLTILVPLQEYQEKILSKTALPEDQKQQLKTLFVKYDNLWQHWENQVGHRKIRPHNIATGDYPPRPQKQYPINPKAKPSIQIVIDDLLKQGVLTPQNSTMNTPVYPVPKPDGRWRMVLDYREVNKTIPLTAAQNQHSAGILATIVRQKYKTTLDLANGFWAHPITPESYWLTAFTWQGKQYCWTRLPQGFLNSPALFTADVVDLLKEIPNVQVYVDDIYLSHDDPKEHVQQLEKVFQILLQAGYVVSLKKSEIGQKTVEFLGFNITKEGRGLTDTFKTKLLNITPPKDLKQLQSILGLLNFARNFIPNFAELVQPLYNLIASAKGKYIEWSEENTKQLNMVIEALNTASNLEERLPEQRLVIKVNTSPSAGYVRYYNETGKKPIMYLNYVFSKAELKFSMLEKLLTTMHKALIKAMDLAMGQEILVYSPIVSMTKIQKTPLPERKALPIRWITWMTYLEDPRIQFHYDKTLPELKHIPDVYTSSQSPVKHPSQYEGVFYTDGSAIKSPDPTKSNNAGMGIVHATYKPEYQVLNQWSIPLGNHTAQMAEIAAVEFACKKALKIPGPVLVITDSFYVAESANKELPYWKSNGFVNNKKKPLKHISKWKSIAECLSMKPDITIQHEKGISLQIPVFILKGNALADKLATQGSYVVNAGKRTADGSEFEKRTADGSEFESPKKKAKVE

SEQ ID NO: 7166 - protein, 2085 aa, synthetic construct
MPAAKRVKLDGGDKKYSIGLDIGTNSVGWAVITDEYKVPSKKFKVLGNTDRHSIKKNLIGALLFDSGETAEATRLKRTARRRYTRRKNRICYLQEIFSNEMAKVDDSFFHRLEESFLVEEDKKHERHPIFGNIVDEVAYHEKYPTIYHLRKKLVDSTDKADLRLIYLALAHMIKFRGHFLIEGDLNPDNSDVDKLFIQLVQTYNQLFEENPINASGVDAKAILSARLSKSRRLENLIAQLPGEKKNGLFGNLIALSLGLTPNFKSNFDLAEDAKLQLSKDTYDDDLDNLLAQIGDQYADLFLAAKNLSDAILLSDILRVNTEITKAPLSASMIKRYDEHHQDLTLLKALVRQQLPEKYKEIFFDQSKNGYAGYIDGGASQEEFYKFIKPILEKMDGTEELLVKLNREDLLRKQRTFDNGSIPHQIHLGELHAILRRQEDFYPFLKDNREKIEKILTFRIPYYVGPLARGNSRFAWMTRKSEETITPWNFEEVVDKGASAQSFIERMTNFDKNLPNEKVLPKHSLLYEYFTVYNELTKVKYVTEGMRKPAFLSGEQKKAIVDLLFKTNRKVTVKQLKEDYFKKIECFDSVEISGVEDRFNASLGTYHDLLKIIKDKDFLDNEENEDILEDIVLTLTLFEDREMIEERLKTYAHLFDDKVMKQLKRRRYTGWGRLSRKLINGIRDKQSGKTILDFLKSDGFANRNFMQLIHDDSLTFKEDIQKAQVSGQGDSLHEHIANLAGSPAIKKGILQTVKVVDELVKVMGRHKPENIVIEMARENQTTQKGQKNSRERMKRIEEGIKELGSQILKEHPVENTQLQNEKLYLYYLQNGRDMYVDQELDINRLSDYDVDHIVPQSFLKDDSIDNKVLTRSDKARGKSDNVPSEEVVKKMKNYWRQLLNAKLITQRKFDNLTKAERGGLSELDKAGFIKRQLVETRQITKHVAQILDSRMNTKYDENDKLIREVKVITLKSKLVSDFRKDFQFYKVREINNYHHAHDAYLNAVVGTALIKKYPKLESEFVYGDYKVYDVRKMIAKSEQEIGKATAKYFFYSNIMNFFKTEITLANGEIRKRPLIETNGETGEIVWDKGRDFATVRKVLSMPQVNIVKKTEVQTGGFSKESILPKRNSDKLIARKKDWDPKKYGGFDSPTVAYSVLVVAKVEKGKSKKLKSVKELLGITIMERSSFEKNPIDFLEAKGYKEVKKDLIIKLPKYSLFELENGRKRMLASAGELQKGNELALPSKYVNFLYLASHYEKLKGSPEDNEQKQLFVEQHKHYLDEIIEQISEFSKRVILADANLDKVLSAYNKHRDKPIREQAENIIHLFTLTNLGAPAAFKYFDTTIDRKRYTSTKEVLDATLIHQSITGLYETRIDLSQLGGDGGPAPGGSGSSGGVPWLTQQPLQLTILVPLQEYQEKILSKTALPEDQKQQLKTLFVKYDNLWQHWENQVGHRKIRPHNIATGDYPPRPQKQYPINPKAKPSIQIVIDDLLKQGVLTPQNSTMNTPVYPVPKPDGRWRMVLDYREVNKTIPLTAAQNQHSAGILATIVRQKYKTTLDLANGFWAHPITPESYWLTAFTWQGKQYCWTRLPQGFLNSPALFNADVVDLLKEIPNVQVYVDDIYLSHDDPKEHVQQLEKVFQILLQAGYVVSLKKSEIGQKTVEFLGFNITKEGRGLTDTFKTKLLNITPPKDLKQLQSILGLLNFARNFIPNFAELVQPLYNLIAPAKGKYIEWSEENTKQLNMVIEALNTASNLEERLPEQRLVIKVNTSPSAGYVRYYNETGKKPIMYLNYVFSKAELKFSMLEKLLTTMHKALIKAMDLAMGQEILVYSPIVSMTKIQKTPLPERKALPIRWITWMTYLEDPRIQFHYDKTLPELKHIPDVYTSSQSPVKHPSQYEGVFYTDGSAIKSPDPTKSNNAGMGIVHATYKPEYQVLNQWSIPLGNHTAQMAEIAAVEFACKKALKIPGPVLVITDSFYVAESANKELPYWKSNGFVNNKKKPLKHISKWKSIAECLSMKPDITIQHEKGISLQIPVFILKGNALADKLATQGSYVVNAGKRTADGSEFEKRTADGSEFESPKKKAKVE

SEQ ID NO: 7167 - protein, 2092 aa, synthetic construct
MPAAKRVKLDGGDKKYSIGLDIGTNSVGWAVITDEYKVPSKKFKVLGNTDRHSIKKNLIGALLFDSGETAEATRLKRTARRRYTRRKNRICYLQEIFSNEMAKVDDSFFHRLEESFLVEEDKKHERHPIFGNIVDEVAYHEKYPTIYHLRKKLVDSTDKADLRLIYLALAHMIKFRGHFLIEGDLNPDNSDVDKLFIQLVQTYNQLFEENPINASGVDAKAILSARLSKSRRLENLIAQLPGEKKNGLFGNLIALSLGLTPNFKSNFDLAEDAKLQLSKDTYDDDLDNLLAQIGDQYADLFLAAKNLSDAILLSDILRVNTEITKAPLSASMIKRYDEHHQDLTLLKALVRQQLPEKYKEIFFDQSKNGYAGYIDGGASQEEFYKFIKPILEKMDGTEELLVKLNREDLLRKQRTFDNGSIPHQIHLGELHAILRRQEDFYPFLKDNREKIEKILTFRIPYYVGPLARGNSRFAWMTRKSEETITPWNFEEVVDKGASAQSFIERMTNFDKNLPNEKVLPKHSLLYEYFTVYNELTKVKYVTEGMRKPAFLSGEQKKAIVDLLFKTNRKVTVKQLKEDYFKKIECFDSVEISGVEDRFNASLGTYHDLLKIIKDKDFLDNEENEDILEDIVLTLTLFEDREMIEERLKTYAHLFDDKVMKQLKRRRYTGWGRLSRKLINGIRDKQSGKTILDFLKSDGFANRNFMQLIHDDSLTFKEDIQKAQVSGQGDSLHEHIANLAGSPAIKKGILQTVKVVDELVKVMGRHKPENIVIEMARENQTTQKGQKNSRERMKRIEEGIKELGSQILKEHPVENTQLQNEKLYLYYLQNGRDMYVDQELDINRLSDYDVDHIVPQSFLKDDSIDNKVLTRSDKARGKSDNVPSEEVVKKMKNYWRQLLNAKLITQRKFDNLTKAERGGLSELDKAGFIKRQLVETRQITKHVAQILDSRMNTKYDENDKLIREVKVITLKSKLVSDFRKDFQFYKVREINNYHHAHDAYLNAVVGTALIKKYPKLESEFVYGDYKVYDVRKMIAKSEQEIGKATAKYFFYSNIMNFFKTEITLANGEIRKRPLIETNGETGEIVWDKGRDFATVRKVLSMPQVNIVKKTEVQTGGFSKESILPKRNSDKLIARKKDWDPKKYGGFDSPTVAYSVLVVAKVEKGKSKKLKSVKELLGITIMERSSFEKNPIDFLEAKGYKEVKKDLIIKLPKYSLFELENGRKRMLASAGELQKGNELALPSKYVNFLYLASHYEKLKGSPEDNEQKQLFVEQHKHYLDEIIEQISEFSKRVILADANLDKVLSAYNKHRDKPIREQAENIIHLFTLTNLGAPAAFKYFDTTIDRKRYTSTKEVLDATLIHQSITGLYETRIDLSQLGGDGGPAPGGSGSSGGVLNLEEEYRLHEKPVPSSIDPSWLQLFPTVWAERAGMGLANQVPPVVVELRSGASPVAVRQYPMSKEAREGIRPHIQKFLDLGVLVPCRSPWNTPLLPVKKPGTNDYRPVQDLREINKRVQDIHPTVPNPYNLLSSLPPSYTWYSVLDLKDAFFCLRLHPNSQPLFAFEWKDPEKGNTGQLTWTRLPQGFKNSPTLFNEALHRDLAPFRALNPQVVLLQYVDDLLVAAPTYEDCKKGTQKLLQELSKLGYRVSAKKAQLCQREVTYLGYLLKEGKRWLTPARKATVMKIPVPTTPRQVREFLGTAGFCRLWIPGFASLAAPLYPLTKPSIPFIWTEEHQQAFDHIKKALLSAPALALPDLTKPFTLYIDERAGVARGVLTQTLGPWRRPVAYLSKKLDPVASGWPTCLKAVAAVALLLKDADKLTLGQNVTVIASHSLESIVRQPPDRWMTNARMTHYQSLLLNERVSFAPPAVLNPATLLPVESEATPVHRCSEILAEETGTRRDLEDQPLPGVPTWYTDGSSFITEGKRRAGAPIVDGKRTVWASSLPEGTSAQKAELVALTQALRLAEGKNINIYTDSRYAFATAHIHGAIYKQRGWLTSAGKDIKNKEEILALLEAIHLPRRVAIIHCPGHQRGSNPVATGNRRADEAAKQAALSTRVLAGTTKPAGKRTADGSEFEKRTADGSEFESPKKKAKVE

SEQ ID NO: 7168 - protein, 2216 aa, synthetic construct
MPAAKRVKLDGGDKKYSIGLDIGTNSVGWAVITDEYKVPSKKFKVLGNTDRHSIKKNLIGALLFDSGETAEATRLKRTARRRYTRRKNRICYLQEIFSNEMAKVDDSFFHRLEESFLVEEDKKHERHPIFGNIVDEVAYHEKYPTIYHLRKKLVDSTDKADLRLIYLALAHMIKFRGHFLIEGDLNPDNSDVDKLFIQLVQTYNQLFEENPINASGVDAKAILSARLSKSRRLENLIAQLPGEKKNGLFGNLIALSLGLTPNFKSNFDLAEDAKLQLSKDTYDDDLDNLLAQIGDQYADLFLAAKNLSDAILLSDILRVNTEITKAPLSASMIKRYDEHHQDLTLLKALVRQQLPEKYKEIFFDQSKNGYAGYIDGGASQEEFYKFIKPILEKMDGTEELLVKLNREDLLRKQRTFDNGSIPHQIHLGELHAILRRQEDFYPFLKDNREKIEKILTFRIPYYVGPLARGNSRFAWMTRKSEETITPWNFEEVVDKGASAQSFIERMTNFDKNLPNEKVLPKHSLLYEYFTVYNELTKVKYVTEGMRKPAFLSGEQKKAIVDLLFKTNRKVTVKQLKEDYFKKIECFDSVEISGVEDRFNASLGTYHDLLKIIKDKDFLDNEENEDILEDIVLTLTLFEDREMIEERLKTYAHLFDDKVMKQLKRRRYTGWGRLSRKLINGIRDKQSGKTILDFLKSDGFANRNFMQLIHDDSLTFKEDIQKAQVSGQGDSLHEHIANLAGSPAIKKGILQTVKVVDELVKVMGRHKPENIVIEMARENQTTQKGQKNSRERMKRIEEGIKELGSQILKEHPVENTQLQNEKLYLYYLQNGRDMYVDQELDINRLSDYDVDHIVPQSFLKDDSIDNKVLTRSDKARGKSDNVPSEEVVKKMKNYWRQLLNAKLITQRKFDNLTKAERGGLSELDKAGFIKRQLVETRQITKHVAQILDSRMNTKYDENDKLIREVKVITLKSKLVSDFRKDFQFYKVREINNYHHAHDAYLNAVVGTALIKKYPKLESEFVYGDYKVYDVRKMIAKSEQEIGKATAKYFFYSNIMNFFKTEITLANGEIRKRPLIETNGETGEIVWDKGRDFATVRKVLSMPQVNIVKKTEVQTGGFSKESILPKRNSDKLIARKKDWDPKKYGGFDSPTVAYSVLVVAKVEKGKSKKLKSVKELLGITIMERSSFEKNPIDFLEAKGYKEVKKDLIIKLPKYSLFELENGRKRMLASAGELQKGNELALPSKYVNFLYLASHYEKLKGSPEDNEQKQLFVEQHKHYLDEIIEQISEFSKRVILADANLDKVLSAYNKHRDKPIREQAENIIHLFTLTNLGAPAAFKYFDTTIDRKRYTSTKEVLDATLIHQSITGLYETRIDLSQLGGDGGPAPGGSGSSGGTLGDQGSRGSDPLPEPRVTLTVEGIPTEFLVNTGAEHSVLTKPMGKMGSKRTVVAGATGSKVYPWTTKRLLKIGQKQVTHSFLVIPECPAPLLGRDLLTKLKAQIQFSTEGPQVTWEDRPAMCLVLNLEEEYRLHEKPVPPSIDPSWLQLFPMVWAEKAGMGLANQVPPVVVELKSDASPVAVRQYPMSKEAREGIRPHIQRFLDLGILVPCQSPWNTPLLPVKKPGTNDYRPVQDLREVNKRVQDIHPTVPNPYNLLSSLPPSHTWYSVLDLKDAFFCLKLHPNSQPLFAFEWRDPEKGNTGQLTWTRLPQGFKNSPTLFDEALHRDLASFRALNPQVVMLQYVDDLLVAAPTYRDCKEGTRRLLQELSKLGYRVSAKKAQLCREEVTYLGYLLKGGKRWLTPARKATVMKIPTPTTPRQVREFLGTAGFCRLWIPGFASLAAPLYPLTREKVPFTWTEAHQEAFGRIKEALLSAPALALPDLTKPFALYVDEKEGVARGVLTQTLGPWRRPVAYLSKKLDPVASGWPTCLKAIAAVALLLKDADKLTLGQNVLVIAPHNLESIVRQPPDRWMTNARMTHYQSLLLNERVSFAPPAILNPATLLPVESDDTPIHICSEILAEETGTRPDLRDQPLPGVPAWYTDGSSFIMDGRRQAGAAIVDNKRTVWASNLPEGTSAQKAELIALTQALRLAEGKSINIYTDSRYAFATAHVHGAIYKQRGLLTSAGKDIKNKEEILALLEAIHLPKRVAIIHCPGHQRGTDPVATGNRKADEAAKQAAQSTRILTETTKNAGKRTADGSEFEKRTADGSEFESPKKKAKVE

SEQ ID NO: 7169 - protein, 2094 aa, synthetic construct
MPAAKRVKLDGGDKKYSIGLDIGTNSVGWAVITDEYKVPSKKFKVLGNTDRHSIKKNLIGALLFDSGETAEATRLKRTARRRYTRRKNRICYLQEIFSNEMAKVDDSFFHRLEESFLVEEDKKHERHPIFGNIVDEVAYHEKYPTIYHLRKKLVDSTDKADLRLIYLALAHMIKFRGHFLIEGDLNPDNSDVDKLFIQLVQTYNQLFEENPINASGVDAKAILSARLSKSRRLENLIAQLPGEKKNGLFGNLIALSLGLTPNFKSNFDLAEDAKLQLSKDTYDDDLDNLLAQIGDQYADLFLAAKNLSDAILLSDILRVNTEITKAPLSASMIKRYDEHHQDLTLLKALVRQQLPEKYKEIFFDQSKNGYAGYIDGGASQEEFYKFIKPILEKMDGTEELLVKLNREDLLRKQRTFDNGSIPHQIHLGELHAILRRQEDFYPFLKDNREKIEKILTFRIPYYVGPLARGNSRFAWMTRKSEETITPWNFEEVVDKGASAQSFIERMTNFDKNLPNEKVLPKHSLLYEYFTVYNELTKVKYVTEGMRKPAFLSGEQKKAIVDLLFKTNRKVTVKQLKEDYFKKIECFDSVEISGVEDRFNASLGTYHDLLKIIKDKDFLDNEENEDILEDIVLTLTLFEDREMIEERLKTYAHLFDDKVMKQLKRRRYTGWGRLSRKLINGIRDKQSGKTILDFLKSDGFANRNFMQLIHDDSLTFKEDIQKAQVSGQGDSLHEHIANLAGSPAIKKGILQTVKVVDELVKVMGRHKPENIVIEMARENQTTQKGQKNSRERMKRIEEGIKELGSQILKEHPVENTQLQNEKLYLYYLQNGRDMYVDQELDINRLSDYDVDHIVPQSFLKDDSIDNKVLTRSDKARGKSDNVPSEEVVKKMKNYWRQLLNAKLITQRKFDNLTKAERGGLSELDKAGFIKRQLVETRQITKHVAQILDSRMNTKYDENDKLIREVKVITLKSKLVSDFRKDFQFYKVREINNYHHAHDAYLNAVVGTALIKKYPKLESEFVYGDYKVYDVRKMIAKSEQEIGKATAKYFFYSNIMNFFKTEITLANGEIRKRPLIETNGETGEIVWDKGRDFATVRKVLSMPQVNIVKKTEVQTGGFSKESILPKRNSDKLIARKKDWDPKKYGGFDSPTVAYSVLVVAKVEKGKSKKLKSVKELLGITIMERSSFEKNPIDFLEAKGYKEVKKDLIIKLPKYSLFELENGRKRMLASAGELQKGNELALPSKYVNFLYLASHYEKLKGSPEDNEQKQLFVEQHKHYLDEIIEQISEFSKRVILADANLDKVLSAYNKHRDKPIREQAENIIHLFTLTNLGAPAAFKYFDTTIDRKRYTSTKEVLDATLIHQSITGLYETRIDLSQLGGDGGPAPGGSGSSGGLGIEDEYRLHETSTEPDVSLGSTWLSDFPQAWAETGGMGLAVRQAPLIIPLKATSTPVSIQQYPMSHEARLGIKPHIQRLLDQGILVPCQSPWNTPLLPVKKPGTNDYRPVQDLREVNKRVEDIHPTVPNPYNLLSGLPPSHQWYTVLDLKDAFFCLRLHPTSQPLFAFEWRDPGMGISGQLTWTRLPQGFKNSPTLFNEALHRDLADFRIQHPDLILLQYVDDILLAATSELDCQQGTRALLQTLGDLGYRASAKKAQICQKQVKYLGYLLREGQRWLTEARKETVMGQPVPKTPRQLREFLGKAGFCRLFIPGFAEMAAPLYPLTKPGTLFSWGPDQQKAYQEIKQALLTAPALGLPDLTKPFELFVDEKQGYAKGVLTQKLGPWRRPVAYLSKKLDPVAAGWPPCLRMVAAIAVLTKDAGKLTMGQPLVILAPHAVEALVKQPPDRWLSNARMTHYQAMLLDTDRVQFGPVVALNPATLLPLPEEGAPHDCLEILAETHGTRPDLTDQPIPDADHTWYTDGSSFLQEGQRKAGAAVTTETEVIWAGALPAGTSAQRAELIALTQALKMAEGKRLNVYTDSRYAFATAHIHGEIYRRRGWLTSEGREIKNKSEILALLKALFLPKRLSIIHCLGHQKGDSAEARGNRLADQAAREAAIKTPPDTSTLLIAGKRTADGSEFEKRTADGSEFESPKKKAKVE

SEQ ID NO: 7170 - protein, 2094 aa, synthetic construct
MPAAKRVKLDGGDKKYSIGLDIGTNSVGWAVITDEYKVPSKKFKVLGNTDRHSIKKNLIGALLFDSGETAEATRLKRTARRRYTRRKNRICYLQEIFSNEMAKVDDSFFHRLEESFLVEEDKKHERHPIFGNIVDEVAYHEKYPTIYHLRKKLVDSTDKADLRLIYLALAHMIKFRGHFLIEGDLNPDNSDVDKLFIQLVQTYNQLFEENPINASGVDAKAILSARLSKSRRLENLIAQLPGEKKNGLFGNLIALSLGLTPNFKSNFDLAEDAKLQLSKDTYDDDLDNLLAQIGDQYADLFLAAKNLSDAILLSDILRVNTEITKAPLSASMIKRYDEHHQDLTLLKALVRQQLPEKYKEIFFDQSKNGYAGYIDGGASQEEFYKFIKPILEKMDGTEELLVKLNREDLLRKQRTFDNGSIPHQIHLGELHAILRRQEDFYPFLKDNREKIEKILTFRIPYYVGPLARGNSRFAWMTRKSEETITPWNFEEVVDKGASAQSFIERMTNFDKNLPNEKVLPKHSLLYEYFTVYNELTKVKYVTEGMRKPAFLSGEQKKAIVDLLFKTNRKVTVKQLKEDYFKKIECFDSVEISGVEDRFNASLGTYHDLLKIIKDKDFLDNEENEDILEDIVLTLTLFEDREMIEERLKTYAHLFDDKVMKQLKRRRYTGWGRLSRKLINGIRDKQSGKTILDFLKSDGFANRNFMQLIHDDSLTFKEDIQKAQVSGQGDSLHEHIANLAGSPAIKKGILQTVKVVDELVKVMGRHKPENIVIEMARENQTTQKGQKNSRERMKRIEEGIKELGSQILKEHPVENTQLQNEKLYLYYLQNGRDMYVDQELDINRLSDYDVDHIVPQSFLKDDSIDNKVLTRSDKARGKSDNVPSEEVVKKMKNYWRQLLNAKLITQRKFDNLTKAERGGLSELDKAGFIKRQLVETRQITKHVAQILDSRMNTKYDENDKLIREVKVITLKSKLVSDFRKDFQFYKVREINNYHHAHDAYLNAVVGTALIKKYPKLESEFVYGDYKVYDVRKMIAKSEQEIGKATAKYFFYSNIMNFFKTEITLANGEIRKRPLIETNGETGEIVWDKGRDFATVRKVLSMPQVNIVKKTEVQTGGFSKESILPKRNSDKLIARKKDWDPKKYGGFDSPTVAYSVLVVAKVEKGKSKKLKSVKELLGITIMERSSFEKNPIDFLEAKGYKEVKKDLIIKLPKYSLFELENGRKRMLASAGELQKGNELALPSKYVNFLYLASHYEKLKGSPEDNEQKQLFVEQHKHYLDEIIEQISEFSKRVILADANLDKVLSAYNKHRDKPIREQAENIIHLFTLTNLGAPAAFKYFDTTIDRKRYTSTKEVLDATLIHQSITGLYETRIDLSQLGGDGGPAPGGSGSSGGTLGIEDEYRLHETSTEPDVSLGSTWLSDFPQAWAETGGMGLAVRQAPLIIPLKATSTPVSIQQYPMSHEARLGIKPHIQRLLDQGILVPCQSPWNTPLLPVKKPGTNDYRPVQDLREVNKRVEDIHPTVPNPYNLLSGLPPSHQWYTVLDLKDAFFCLRLHPTSQPLFAFEWRDPGMGISGQLTWTRLPQGFKNSPTLFNEALHRDLADFRIQHPDLILLQYVDDILLAATSELDCQQGTRALLQTLGDLGYRASAKKAQICQKQVKYLGYLLREGQRWLTEARKETVMGQPVPKTPRQLREFLGTAGFCRLWIPGFAEMAAPLYPLTKPGTLFSWGPDQQKAYQEIKQALLTAPALGLPDLTKPFELFVDEKQGYAKGVLTQKLGPWRRPVAYLSKKLDPVAAGWPPCLRMVAAIAVLTKDAGKLTMGQPLVILAPHAVEALVKQPPDRWLSNARMTHYQAMLLDTDRVQFGPVVALNPATLLPLPEEGAPHDCLEILAETHGTRPDLTDQPIPDADHTWYTDGSSFLQEGQRKAGAAVTTETEVIWAGALPAGTSAQRAELIALTQALKMAEGKRLNVYTDSRYAFATAHIHGEIYRRRGWLTSEGREIKNKSEILALLKALFLPKRLSIIHCLGHQKGDSAEARGNRLADQAAREAAIKTPPDTSTLLAGKRTADGSEFEKRTADGSEFESPKKKAKVE

SEQ ID NO: 7171 - protein, 2094 aa, synthetic construct
MPAAKRVKLDGGDKKYSIGLDIGTNSVGWAVITDEYKVPSKKFKVLGNTDRHSIKKNLIGALLFDSGETAEATRLKRTARRRYTRRKNRICYLQEIFSNEMAKVDDSFFHRLEESFLVEEDKKHERHPIFGNIVDEVAYHEKYPTIYHLRKKLVDSTDKADLRLIYLALAHMIKFRGHFLIEGDLNPDNSDVDKLFIQLVQTYNQLFEENPINASGVDAKAILSARLSKSRRLENLIAQLPGEKKNGLFGNLIALSLGLTPNFKSNFDLAEDAKLQLSKDTYDDDLDNLLAQIGDQYADLFLAAKNLSDAILLSDILRVNTEITKAPLSASMIKRYDEHHQDLTLLKALVRQQLPEKYKEIFFDQSKNGYAGYIDGGASQEEFYKFIKPILEKMDGTEELLVKLNREDLLRKQRTFDNGSIPHQIHLGELHAILRRQEDFYPFLKDNREKIEKILTFRIPYYVGPLARGNSRFAWMTRKSEETITPWNFEEVVDKGASAQSFIERMTNFDKNLPNEKVLPKHSLLYEYFTVYNELTKVKYVTEGMRKPAFLSGEQKKAIVDLLFKTNRKVTVKQLKEDYFKKIECFDSVEISGVEDRFNASLGTYHDLLKIIKDKDFLDNEENEDILEDIVLTLTLFEDREMIEERLKTYAHLFDDKVMKQLKRRRYTGWGRLSRKLINGIRDKQSGKTILDFLKSDGFANRNFMQLIHDDSLTFKEDIQKAQVSGQGDSLHEHIANLAGSPAIKKGILQTVKVVDELVKVMGRHKPENIVIEMARENQTTQKGQKNSRERMKRIEEGIKELGSQILKEHPVENTQLQNEKLYLYYLQNGRDMYVDQELDINRLSDYDVDHIVPQSFLKDDSIDNKVLTRSDKARGKSDNVPSEEVVKKMKNYWRQLLNAKLITQRKFDNLTKAERGGLSELDKAGFIKRQLVETRQITKHVAQILDSRMNTKYDENDKLIREVKVITLKSKLVSDFRKDFQFYKVREINNYHHAHDAYLNAVVGTALIKKYPKLESEFVYGDYKVYDVRKMIAKSEQEIGKATAKYFFYSNIMNFFKTEITLANGEIRKRPLIETNGETGEIVWDKGRDFATVRKVLSMPQVNIVKKTEVQTGGFSKESILPKRNSDKLIARKKDWDPKKYGGFDSPTVAYSVLVVAKVEKGKSKKLKSVKELLGITIMERSSFEKNPIDFLEAKGYKEVKKDLIIKLPKYSLFELENGRKRMLASAGELQKGNELALPSKYVNFLYLASHYEKLKGSPEDNEQKQLFVEQHKHYLDEIIEQISEFSKRVILADANLDKVLSAYNKHRDKPIREQAENIIHLFTLTNLGAPAAFKYFDTTIDRKRYTSTKEVLDATLIHQSITGLYETRIDLSQLGGDGGPAPGGSGSSGGTLNIEDEYRLHETSKEPDVSLGSTWLSDFPQAWAETGGMGLAVRQAPLIIPLKATSTPVSIKQYPMSQEARLGIKPHIQRLLDQGILVPCQSPWNTPLLPVKKPGTNDYRPVQDLREVNKRVEDIHPTVPNPYNLLSGLPPSHQWYTVLDLKDAFFCLRLHPTSQPLFAFEWRDPEMGISGQLTWTRLPQGFKNSPTLFNEALHRDLAGFRIQHPDLILLQYVDDLLLAATSELDCQQGTRALLQTLGDLGYRASAKKAQICQKQVKYLGYLLKEGQRWLTEARKETVMGQPIPKTPRQLREFLGTAGFCRLWIPGFAEMAAPLYPLTKPGTLFNWGPDQQKAFQEIKQALLTAPALGLPDLTKPFELFVDEKQGYAKGVLTQKLGPWRRPVAYLSKKLDPVAAGWPPCLRMVAAIAVLTKDAGKLTMGQPLVILAPHAVEALVKQPPDRWLSNARMTHYQALLLDTDRVQFGPVVALNPATLLPLPEEGLQHDCLDILAEAHGTRSDLMDQPLPDADHTWYTDGSSFLQEGQRKAGAAVTTETEVIWARALPAGTSAQRAELIALTQALKMAEGKKLNVYTDSRYAFATAHIHGEIYRRRGWLTSEGKEIKNKDEILALLKALFLPKRLSIIHCPGHQKGNSAEARGNRMADQAAREVATRETPETSTLLAGKRTADGSEFEKRTADGSEFESPKKKAKVE

SEQ ID NO: 7172 - protein, 2114 aa, synthetic construct
MPAAKRVKLDGGDKKYSIGLDIGTNSVGWAVITDEYKVPSKKFKVLGNTDRHSIKKNLIGALLFDSGETAEATRLKRTARRRYTRRKNRICYLQEIFSNEMAKVDDSFFHRLEESFLVEEDKKHERHPIFGNIVDEVAYHEKYPTIYHLRKKLVDSTDKADLRLIYLALAHMIKFRGHFLIEGDLNPDNSDVDKLFIQLVQTYNQLFEENPINASGVDAKAILSARLSKSRRLENLIAQLPGEKKNGLFGNLIALSLGLTPNFKSNFDLAEDAKLQLSKDTYDDDLDNLLAQIGDQYADLFLAAKNLSDAILLSDILRVNTEITKAPLSASMIKRYDEHHQDLTLLKALVRQQLPEKYKEIFFDQSKNGYAGYIDGGASQEEFYKFIKPILEKMDGTEELLVKLNREDLLRKQRTFDNGSIPHQIHLGELHAILRRQEDFYPFLKDNREKIEKILTFRIPYYVGPLARGNSRFAWMTRKSEETITPWNFEEVVDKGASAQSFIERMTNFDKNLPNEKVLPKHSLLYEYFTVYNELTKVKYVTEGMRKPAFLSGEQKKAIVDLLFKTNRKVTVKQLKEDYFKKIECFDSVEISGVEDRFNASLGTYHDLLKIIKDKDFLDNEENEDILEDIVLTLTLFEDREMIEERLKTYAHLFDDKVMKQLKRRRYTGWGRLSRKLINGIRDKQSGKTILDFLKSDGFANRNFMQLIHDDSLTFKEDIQKAQVSGQGDSLHEHIANLAGSPAIKKGILQTVKVVDELVKVMGRHKPENIVIEMARENQTTQKGQKNSRERMKRIEEGIKELGSQILKEHPVENTQLQNEKLYLYYLQNGRDMYVDQELDINRLSDYDVDHIVPQSFLKDDSIDNKVLTRSDKARGKSDNVPSEEVVKKMKNYWRQLLNAKLITQRKFDNLTKAERGGLSELDKAGFIKRQLVETRQITKHVAQILDSRMNTKYDENDKLIREVKVITLKSKLVSDFRKDFQFYKVREINNYHHAHDAYLNAVVGTALIKKYPKLESEFVYGDYKVYDVRKMIAKSEQEIGKATAKYFFYSNIMNFFKTEITLANGEIRKRPLIETNGETGEIVWDKGRDFATVRKVLSMPQVNIVKKTEVQTGGFSKESILPKRNSDKLIARKKDWDPKKYGGFDSPTVAYSVLVVAKVEKGKSKKLKSVKELLGITIMERSSFEKNPIDFLEAKGYKEVKKDLIIKLPKYSLFELENGRKRMLASAGELQKGNELALPSKYVNFLYLASHYEKLKGSPEDNEQKQLFVEQHKHYLDEIIEQISEFSKRVILADANLDKVLSAYNKHRDKPIREQAENIIHLFTLTNLGAPAAFKYFDTTIDRKRYTSTKEVLDATLIHQSITGLYETRIDLSQLGGDGGPAPGGSGSSGGTLNIEDEYRLHETSKEPDVSLGSTWLSDFPQAWAETGGMGLAVRQAPLIIPLKATSTPVSIKQYPMSQEARLGIKPHIQRLLDQGILVPCQSPWNTPLLPVKKPGTNDYRPVQDLREVNKRVEDIHPTVPNPYNLLSGLPPSHQWYTVLDLKDAFFCLRLHPTSQPLFAFEWRDPEMGISGQLTWTRLPQGFKNSPTLFNEALHRDLADFRIQHPDLILLQYVDDLLLAATSELDCQQGTRALLQTLGNLGYRASAKKAQICQKQVKYLGYLLKEGQRWLTEARKETVMGQPTPKTPRQLREFLGKAGFCRLFIPGFAEMAAPLYPLTKPGTLFNWGPDQQKAYQEIKQALLTAPALGLPDLTKPFELFVDEKQGYAKGVLTQKLGPWRRPVAYLSKKLDPVAAGWPPCLRMVAAIAVLTKDAGKLTMGQPLVILAPHAVEALVKQPPDRWLSNARMTHYQALLLDTDRVQFGPVVALNPATLLPLPEEGLQHNCLDILAEAHGTRPDLTDQPLPDADHTWYTDGSSLLQEGQRKAGAAVTTETEVIWAKALPAGTSAQRAELIALTQALKMAEGKKLNVYTDSRYAFATAHIHGEIYRRRGWLTSEGKEIKNKDEILALLKALFLPKRLSIIHCPGHQKGHSAEARGNRMADQAARKAAITETPDTSTLLIENSSPSGGSKRTADGSEFEAGKRTADGSEFEKRTADGSEFESPKKKAKVE

SEQ ID NO: 7173 - protein, 2094 aa, synthetic construct
MPAAKRVKLDGGDKKYSIGLDIGTNSVGWAVITDEYKVPSKKFKVLGNTDRHSIKKNLIGALLFDSGETAEATRLKRTARRRYTRRKNRICYLQEIFSNEMAKVDDSFFHRLEESFLVEEDKKHERHPIFGNIVDEVAYHEKYPTIYHLRKKLVDSTDKADLRLIYLALAHMIKFRGHFLIEGDLNPDNSDVDKLFIQLVQTYNQLFEENPINASGVDAKAILSARLSKSRRLENLIAQLPGEKKNGLFGNLIALSLGLTPNFKSNFDLAEDAKLQLSKDTYDDDLDNLLAQIGDQYADLFLAAKNLSDAILLSDILRVNTEITKAPLSASMIKRYDEHHQDLTLLKALVRQQLPEKYKEIFFDQSKNGYAGYIDGGASQEEFYKFIKPILEKMDGTEELLVKLNREDLLRKQRTFDNGSIPHQIHLGELHAILRRQEDFYPFLKDNREKIEKILTFRIPYYVGPLARGNSRFAWMTRKSEETITPWNFEEVVDKGASAQSFIERMTNFDKNLPNEKVLPKHSLLYEYFTVYNELTKVKYVTEGMRKPAFLSGEQKKAIVDLLFKTNRKVTVKQLKEDYFKKIECFDSVEISGVEDRFNASLGTYHDLLKIIKDKDFLDNEENEDILEDIVLTLTLFEDREMIEERLKTYAHLFDDKVMKQLKRRRYTGWGRLSRKLINGIRDKQSGKTILDFLKSDGFANRNFMQLIHDDSLTFKEDIQKAQVSGQGDSLHEHIANLAGSPAIKKGILQTVKVVDELVKVMGRHKPENIVIEMARENQTTQKGQKNSRERMKRIEEGIKELGSQILKEHPVENTQLQNEKLYLYYLQNGRDMYVDQELDINRLSDYDVDHIVPQSFLKDDSIDNKVLTRSDKARGKSDNVPSEEVVKKMKNYWRQLLNAKLITQRKFDNLTKAERGGLSELDKAGFIKRQLVETRQITKHVAQILDSRMNTKYDENDKLIREVKVITLKSKLVSDFRKDFQFYKVREINNYHHAHDAYLNAVVGTALIKKYPKLESEFVYGDYKVYDVRKMIAKSEQEIGKATAKYFFYSNIMNFFKTEITLANGEIRKRPLIETNGETGEIVWDKGRDFATVRKVLSMPQVNIVKKTEVQTGGFSKESILPKRNSDKLIARKKDWDPKKYGGFDSPTVAYSVLVVAKVEKGKSKKLKSVKELLGITIMERSSFEKNPIDFLEAKGYKEVKKDLIIKLPKYSLFELENGRKRMLASAGELQKGNELALPSKYVNFLYLASHYEKLKGSPEDNEQKQLFVEQHKHYLDEIIEQISEFSKRVILADANLDKVLSAYNKHRDKPIREQAENIIHLFTLTNLGAPAAFKYFDTTIDRKRYTSTKEVLDATLIHQSITGLYETRIDLSQLGGDGGPAPGGSGSSGGTLNIEDEHRLHETSKEPDVSLGSTWLSDFPQAWAETGGMGLAVRQAPLIIPLKATSTPVSIKQYPMSQEARLGIKPHIQRLLDQGILVPCQSPWNTPLLPVKKPGTNDYRPVQDLREVNKRVEDIHPTVPNPYNLLSGLPPSHQWYTVLDLKDAFFCLRLHPTSQPLFAFEWRDPEMGISGQLTWTRLPQGFKNSPTLFNEALHRDLADFRIQHPDLILLQYVDDLLLAATSELDCQQGTRALLQTLGNLGYRASAKKAQICQKQVKYLGYLLKEGQRWLTEARKETVMGQPTPKTPRQLREFLGTAGFCRLWIPGFAEMAAPLYPLTKPGTLFNWGPDQQKAYQEIKQALLTAPALGLPDLTKPFELFVDEKQGYAKGVLTQKLGPWRRPVAYLSKKLDPVAAGWPPCLRMVAAIAVLTKDAGKLTMGQPLVILAPHAVEALVKQPPDRWLSNARMTHYQALLLDTDRVQFGPVVALNPATLLPLPEEGLQHNCLDILAEAHGTRPDLTDQPLPDADHTWYTDGSSLLQEGQRKAGAAVTTETEVIWAKALPAGTSAQRAELIALTQALKMAEGKKLNVYTDSRYAFATAHIHGEIYRRRGWLTSEGKEIKNKDEILALLKALFLPKRLSIIHCPGHQKGHSAEARGNRMADQAARKAAITETPDTSTLLAGKRTADGSEFEKRTADGSEFESPKKKAKVE

SEQ ID NO: 7174 - protein, 2114 aa, synthetic construct; identical to SEQ ID NO: 7172

SEQ ID NO: 7175 - protein, 2094 aa, synthetic construct
MPAAKRVKLDGGDKKYSIGLDIGTNSVGWAVITDEYKVPSKKFKVLGNTDRHSIKKNLIGALLFDSGETAEATRLKRTARRRYTRRKNRICYLQEIFSNEMAKVDDSFFHRLEESFLVEEDKKHERHPIFGNIVDEVAYHEKYPTIYHLRKKLVDSTDKADLRLIYLALAHMIKFRGHFLIEGDLNPDNSDVDKLFIQLVQTYNQLFEENPINASGVDAKAILSARLSKSRRLENLIAQLPGEKKNGLFGNLIALSLGLTPNFKSNFDLAEDAKLQLSKDTYDDDLDNLLAQIGDQYADLFLAAKNLSDAILLSDILRVNTEITKAPLSASMIKRYDEHHQDLTLLKALVRQQLPEKYKEIFFDQSKNGYAGYIDGGASQEEFYKFIKPILEKMDGTEELLVKLNREDLLRKQRTFDNGSIPHQIHLGELHAILRRQEDFYPFLKDNREKIEKILTFRIPYYVGPLARGNSRFAWMTRKSEETITPWNFEEVVDKGASAQSFIERMTNFDKNLPNEKVLPKHSLLYEYFTVYNELTKVKYVTEGMRKPAFLSGEQKKAIVDLLFKTNRKVTVKQLKEDYFKKIECFDSVEISGVEDRFNASLGTYHDLLKIIKDKDFLDNEENEDILEDIVLTLTLFEDREMIEERLKTYAHLFDDKVMKQLKRRRYTGWGRLSRKLINGIRDKQSGKTILDFLKSDGFANRNFMQLIHDDSLTFKEDIQKAQVSGQGDSLHEHIANLAGSPAIKKGILQTVKVVDELVKVMGRHKPENIVIEMARENQTTQKGQKNSRERMKRIEEGIKELGSQILKEHPVENTQLQNEKLYLYYLQNGRDMYVDQELDINRLSDYDVDHIVPQSFLKDDSIDNKVLTRSDKARGKSDNVPSEEVVKKMKNYWRQLLNAKLITQRKFDNLTKAERGGLSELDKAGFIKRQLVETRQITKHVAQILDSRMNTKYDENDKLIREVKVITLKSKLVSDFRKDFQFYKVREINNYHHAHDAYLNAVVGTALIKKYPKLESEFVYGDYKVYDVRKMIAKSEQEIGKATAKYFFYSNIMNFFKTEITLANGEIRKRPLIETNGETGEIVWDKGRDFATVRKVLSMPQVNIVKKTEVQTGGFSKESILPKRNSDKLIARKKDWDPKKYGGFDSPTVAYSVLVVAKVEKGKSKKLKSVKELLGITIMERSSFEKNPIDFLEAKGYKEVKKDLIIKLPKYSLFELENGRKRMLASAGELQKGNELALPSKYVNFLYLASHYEKLKGSPEDNEQKQLFVEQHKHYLDEIIEQISEFSKRVILADANLDKVLSAYNKHRDKPIREQAENIIHLFTLTNLGAPAAFKYFDTTIDRKRYTSTKEVLDATLIHQSITGLYETRIDLSQLGGDGGPAPGGSGSSGGTLNIEDEHRLHETSKEPDVSLGSTWLSDFPQAWAETGGMGLAVRQAPLIIPLKATSTPVSIKQYPMSQEARLGIKPHIQRLLDQGILVPCQSPWNTPLLPVKKPGTNDYRPVQDLREVNKRVEDIHPTVPNPYNLLSGLPPSHQWYTVLDLKDAFFCLRLHPTSQPLFAFEWRDPEMGISGQLTWTRLPQGFKNSPTLFDEALHRDLADFRIQHPDLILLQYVDDLLLAATSELDCQQGTRALLQTLGNLGYRASAKKAQICQKQVKYLGYLLKEGQRWLTEARKETVMGQPTPKTPRQLREFLGTAGFCRLWIPGFAEMAAPLYPLTKTGTLFNWGPDQQKAYQEIKQALLTAPALGLPDLTKPFELFVDEKQGYAKGVLTQKLGPWRRPVAYLSKKLDPVAAGWPPCLRMVAAIAVLTKDAGKLTMGQPLVILAPHAVEALVKQPPDRWLSNARMTHYQALLLDTDRVQFGPVVALNPATLLPLPEEGLQHNCLDILAEAHGTRPDLTDQPLPDADHTWYTDGSSLLQEGQRKAGAAVTTETEVIWAKALPAGTSAQRAELIALTQALKMAEGKKLNVYTDSRYAFATAHIHGEIYRRRGLLTSEGKEIKNKDEILALLKALFLPKRLSIIHCPGHQKGHSAEARGNRMADQAARKAAITETPDTSTLLAGKRTADGSEFEKRTADGSEFESPKKKAKVE

SEQ ID NO: 7176 - protein, 2094 aa, synthetic construct; identical to SEQ ID NO: 7173

SEQ ID NO: 7177 - protein, 2085 aa, synthetic construct
MPAAKRVKLDGGDKKYSIGLDIGTNSVGWAVITDEYKVPSKKFKVLGNTDRHSIKKNLIGALLFDSGETAEATRLKRTARRRYTRRKNRICYLQEIFSNEMAKVDDSFFHRLEESFLVEEDKKHERHPIFGNIVDEVAYHEKYPTIYHLRKKLVDSTDKADLRLIYLALAHMIKFRGHFLIEGDLNPDNSDVDKLFIQLVQTYNQLFEENPINASGVDAKAILSARLSKSRRLENLIAQLPGEKKNGLFGNLIALSLGLTPNFKSNFDLAEDAKLQLSKDTYDDDLDNLLAQIGDQYADLFLAAKNLSDAILLSDILRVNTEITKAPLSASMIKRYDEHHQDLTLLKALVRQQLPEKYKEIFFDQSKNGYAGYIDGGASQEEFYKFIKPILEKMDGTEELLVKLNREDLLRKQRTFDNGSIPHQIHLGELHAILRRQEDFYPFLKDNREKIEKILTFRIPYYVGPLARGNSRFAWMTRKSEETITPWNFEEVVDKGASAQSFIERMTNFDKNLPNEKVLPKHSLLYEYFTVYNELTKVKYVTEGMRKPAFLSGEQKKAIVDLLFKTNRKVTVKQLKEDYFKKIECFDSVEISGVEDRFNASLGTYHDLLKIIKDKDFLDNEENEDILEDIVLTLTLFEDREMIEERLKTYAHLFDDKVMKQLKRRRYTGWGRLSRKLINGIRDKQSGKTILDFLKSDGFANRNFMQLIHDDSLTFKEDIQKAQVSGQGDSLHEHIANLAGSPAIKKGILQTVKVVDELVKVMGRHKPENIVIEMARENQTTQKGQKNSRERMKRIEEGIKELGSQILKEHPVENTQLQNEKLYLYYLQNGRDMYVDQELDINRLSDYDVDHIVPQSFLKDDSIDNKVLTRSDKARGKSDNVPSEEVVKKMKNYWRQLLNAKLITQRKFDNLTKAERGGLSELDKAGFIKRQLVETRQITKHVAQILDSRMNTKYDENDKLIREVKVITLKSKLVSDFRKDFQFYKVREINNYHHAHDAYLNAVVGTALIKKYPKLESEFVYGDYKVYDVRKMIAKSEQEIGKATAKYFFYSNIMNFFKTEITLANGEIRKRPLIETNGETGEIVWDKGRDFATVRKVLSMPQVNIVKKTEVQTGGFSKESILPKRNSDKLIARKKDWDPKKYGGFDSPTVAYSVLVVAKVEKGKSKKLKSVKELLGITIMERSSFEKNPIDFLEAKGYKEVKKDLIIKLPKYSLFELENGRKRMLASAGELQKGNELALPSKYVNFLYLASHYEKLKGSPEDNEQKQLFVEQHKHYLDEIIEQISEFSKRVILADANLDKVLSAYNKHRDKPIREQAENIIHLFTLTNLGAPAAFKYFDTTIDRKRYTSTKEVLDATLIHQSITGLYETRIDLSQLGGDGGPAPGGSGSSGGIPWLMKKPLQLTTLVPLQEYEERLLKQTMLTGSYKEKLQSLFLKYDALWQHWENQVGHRRIKPHHIATGTVNPRPQKQYPINPKAKASIQTVINDLLKQGVLIQQNSIMNTPVYPVPKPDGKWRMVLDYREVNKTIPLIAAQNQHSAGILSSIFRGKYKTTLDLSNGFWAHSITPESYWLTAFTWLGQQYCWTRLPQGFLNSPALFNADVVDLLKEVPNVQVYVDDIYISHDDPREHLEQLEKVFSLLLNAGYVVSLKKSEIAQHEVEFLGFNITKEGRGLTETFKQKLLNITPPRDLKQLQSILGKLNFARNFIPNFSELVKPLYNIIATAPGKYITWTTDNSQQLQNIISMLNSAENLEERNPEVRLIMKVNTSPSAGYIRFYNEFAKRPIMYLNYVYTKAEVKFTNTEKLLTTIHKGLIKALDLGMGQEILVYSPIVSMTKIQKTPLPERKALPIRWITWMSYLEDPRIQFHYDKTLPELQQVPTVTDDIIAKIKHPSEFSMVFYTDGSAIKHPNVNKSHNAGMGIAQVQFKPEFTVINTWSIPLGDHTAQLAEVAAVEFACKKALKIDGPVLIVTDSFYVAESVNKELPYWQSNGFFNNKKKPLKHVSKWKSIADCIQLKPDIIIIHEKGHQPTASTFHTEGNNLADKLATQGSYVVNAGKRTADGSEFEKRTADGSEFESPKKKAKVE

SEQ ID NO: 7178 - protein, 2092 aa, synthetic construct
MPAAKRVKLDGGDKKYSIGLDIGTNSVGWAVITDEYKVPSKKFKVLGNTDRHSIKKNLIGALLFDSGETAEATRLKRTARRRYTRRKNRICYLQEIFSNEMAKVDDSFFHRLEESFLVEEDKKHERHPIFGNIVDEVAYHEKYPTIYHLRKKLVDSTDKADLRLIYLALAHMIKFRGHFLIEGDLNPDNSDVDKLFIQLVQTYNQLFEENPINASGVDAKAILSARLSKSRRLENLIAQLPGEKKNGLFGNLIALSLGLTPNFKSNFDLAEDAKLQLSKDTYDDDLDNLLAQIGDQYADLFLAAKNLSDAILLSDILRVNTEITKAPLSASMIKRYDEHHQDLTLLKALVRQQLPEKYKEIFFDQSKNGYAGYIDGGASQEEFYKFIKPILEKMDGTEELLVKLNREDLLRKQRTFDNGSIPHQIHLGELHAILRRQEDFYPFLKDNREKIEKILTFRIPYYVGPLARGNSRFAWMTRKSEETITPWNFEEVVDKGASAQSFIERMTNFDKNLPNEKVLPKHSLLYEYFTVYNELTKVKYVTEGMRKPAFLSGEQKKAIVDLLFKTNRKVTVKQLKEDYFKKIECFDSVEISGVEDRFNASLGTYHDLLKIIKDKDFLDNEENEDILEDIVLTLTLFEDREMIEERLKTYAHLFDDKVMKQLKRRRYTGWGRLSRKLINGIRDKQSGKTILDFLKSDGFANRNFMQLIHDDSLTFKEDIQKAQVSGQGDSLHEHIANLAGSPAIKKGILQTVKVVDELVKVMGRHKPENIVIEMARENQTTQKGQKNSRERMKRIEEGIKELGSQILKEHPVENTQLQNEKLYLYYLQNGRDMYVDQELDINRLSDYDVDHIVPQSFLKDDSIDNKVLTRSDKARGKSDNVPSEEVVKKMKNYWRQLLNAKLITQRKFDNLTKAERGGLSELDKAGFIKRQLVETRQITKHVAQILDSRMNTKYDENDKLIREVKVITLKSKLVSDFRKDFQFYKVREINNYHHAHDAYLNAVVGTALIKKYPKLESEFVYGDYKVYDVRKMIAKSEQEIGKATAKYFFYSNIMNFFKTEITLANGEIRKRPLIETNGETGEIVWDKGRDFATVRKVLSMPQVNIVKKTEVQTGGFSKESILPKRNSDKLIARKKDWDPKKYGGFDSPTVAYSVLVVAKVEKGKSKKLKSVKELLGITIMERSSFEKNPIDFLEAKGYKEVKKDLIIKLPKYSLFELENGRKRMLASAGELQKGNELALPSKYVNFLYLASHYEKLKGSPEDNEQKQLFVEQHKHYLDEIIEQISEFSKRVILADANLDKVLSAYNKHRDKPIREQAENIIHLFTLTNLGAPAAFKYFDTTIDRKRYTSTKEVLDATLIHQSITGLYETRIDLSQLGGDGGPAPGGSGSSGGVLNLEEEYRLHEKPVPSSIDPSWLQLFPTVWAERAGMGLANQVPPVVVELRSGASPVAVRQYPMSKEAREGIRPHIQRFLDLGVLVPCQSPWNTPLLPVKKPGTNDYRPVQDLREINKRVQDIHPTVPNPYNLLSSLPPSHTWYSVLDLKDAFFCLKLHPNSQPLFAFEWRDPEKGNTGQLTWTRLPQGFKNSPTLFNEALHRDLAPFRALNPQVVLLQYVDDLLVAAPTYRDCKEGTQKLLQELSKLGYRVSAKKAQLCQKEVTYLGYLLKEGKRWLTPARKATVMKIPPPTTPRQVREFLGTAGFCRLWIPGFASLAAPLYPLTKPSIPFIWTEEHQKAFDRIKEALLSAPALALPDLTKPFTLYVDERAGVARGVLTQTLGPWRRPVAYLSKKLDPVASGWPTCLKAVAAVALLLKDADKLTLGQNVTVIASHSLESIVRQPPDRWMTNARMTHYQSLLLNERVSFAPPAVLNPATLLPVESEATPVHRCSEILAEETGTRRDLKDQPLPGVPAWYTDGSSFIAEGKRRAGAAIVDGKRTVWASSLPEGTSAQKAELVALTQALRLAEGKDINIYTDSRYAFATAHIHGAIYKQRGWLTSAGKDIKNKEEILALLEAIHLPKRVAIIHCPGHQKGNDPVATGNRRADEAAKQAALSTRVLAETTKPAGKRTADGSEFEKRTADGSEFESPKKKAKVE

SEQ ID NO: 7179 - protein, 2094 aa, synthetic construct
MPAAKRVKLDGGDKKYSIGLDIGTNSVGWAVITDEYKVPSKKFKVLGNTDRHSIKKNLIGALLFDSGETAEATRLKRTARRRYTRRKNRICYLQEIFSNEMAKVDDSFFHRLEESFLVEEDKKHERHPIFGNIVDEVAYHEKYPTIYHLRKKLVDSTDKADLRLIYLALAHMIKFRGHFLIEGDLNPDNSDVDKLFIQLVQTYNQLFEENPINASGVDAKAILSARLSKSRRLENLIAQLPGEKKNGLFGNLIALSLGLTPNFKSNFDLAEDAKLQLSKDTYDDDLDNLLAQIGDQYADLFLAAKNLSDAILLSDILRVNTEITKAPLSASMIKRYDEHHQDLTLLKALVRQQLPEKYKEIFFDQSKNGYAGYIDGGASQEEFYKFIKPILEKMDGTEELLVKLNREDLLRKQRTFDNGSIPHQIHLGELHAILRRQEDFYPFLKDNREKIEKILTFRIPYYVGPLARGNSRFAWMTRKSEETITPWNFEEVVDKGASAQSFIERMTNFDKNLPNEKVLPKHSLLYEYFTVYNELTKVKYVTEGMRKPAFLSGEQKKAIVDLLFKTNRKVTVKQLKEDYFKKIECFDSVEISGVEDRFNASLGTYHDLLKIIKDKDFLDNEENEDILEDIVLTLTLFEDREMIEERLKTYAHLFDDKVMKQLKRRRYTGWGRLSRKLINGIRDKQSGKTILDFLKSDGFANRNFMQLIHDDSLTFKEDIQKAQVSGQGDSLHEHIANLAGSPAIKKGILQTVKVVDELVKVMGRHKPENIVIEMARENQTTQKGQKNSRERMKRIEEGIKELGSQILKEHPVENTQLQNEKLYLYYLQNGRDMYVDQELDINRLSDYDVDHIVPQSFLKDDSIDNKVLTRSDKARGKSDNVPSEEVVKKMKNYWRQLLNAKLITQRKFDNLTKAERGGLSELDKAGFIKRQLVETRQITKHVAQILDSRMNTKYDENDKLIREVKVITLKSKLVSDFRKDFQFYKVREINNYHHAHDAYLNAVVGTALIKKYPKLESEFVYGDYKVYDVRKMIAKSEQEIGKATAKYFFYSNIMNFFKTEITLANGEIRKRPLIETNGETGEIVWDKGRDFATVRKVLSMPQVNIVKKTEVQTGGFSKESILPKRNSDKLIARKKDWDPKKYGGFDSPTVAYSVLVVAKVEKGKSKKLKSVKELLGITIMERSSFEKNPIDFLEAKGYKEVKKDLIIKLPKYSLFELENGRKRMLASAGELQKGNELALPSKYVNFLYLASHYEKLKGSPEDNEQKQLFVEQHKHYLDEIIEQISEFSKRVILADANLDKVLSAYNKHRDKPIREQAENIIHLFTLTNLGAPAAFKYFDTTIDRKRYTSTKEVLDATLIHQSITGLYETRIDLSQLGGDGGPAPGGSGSSGGTLNIEDEYRLHETSKEPDVPLGSTWLSDFPQAWAETGGMGLAVRQAPLIIPLKATSTPVSIKQYPMSQEARLGIKPHIQRLLDQGILVPCQSPWNTPLLPVKKPGTNDYRPVQDLREVNKRVEDIHPTVPNPYNLLSGLPPSHQWYTVLDLKDAFFCLRLHPTSQPLFAFEWRDPEMGISGQLTWTRLPQGFKNSPTLFNEALHRDLADFRIQHPDLILLQYVDDLLLAATSEQDCQRGTRALLQTLGNLGYRASAKKAQICQKQVKYLGYLLKEGQRWLTEARKETVMGQPTPKTPRQLREFLGTAGFCRLWIPGFAEMAAPLYPLTKPGTLFNWGPDQQKAYQEIKQALLTAPALGLPDLTKPFELFVDEKQGYAKGVLTQKLGPWRRPVAYLSKKLDPVAAGWPPCLRMVAAIAVLTKDAGKLTMGQPLVILAPHAVEALVKQPPDRWLSNARMTHYQAMLLDTDRVQFGPVVALNPATLLPLPEKEAPHDCLEILAETHGTRPDLTDQPIPDADYTWYTDGSSFLQEGQRRAGAAVTTETEVIWARALPAGTSAQRAELIALTQALKMAEGKKLNVYTDSRYAFATAHVHGEIYRRRGWLTSEGREIKNKNEILALLKALFLPKRLSIIHCPGHQKGNSAEARGNRMADQAAREAAMKAVLETSTLLAGKRTADGSEFEKRTADGSEFESPKKKAKVE

SEQ ID NO: 7180 - protein, 2094 aa, synthetic construct
MPAAKRVKLDGGDKKYSIGLDIGTNSVGWAVITDEYKVPSKKFKVLGNTDRHSIKKNLIGALLFDSGETAEATRLKRTARRRYTRRKNRICYLQEIFSNEMAKVDDSFFHRLEESFLVEEDKKHERHPIFGNIVDEVAYHEKYPTIYHLRKKLVDSTDKADLRLIYLALAHMIKFRGHFLIEGDLNPDNSDVDKLFIQLVQTYNQLFEENPINASGVDAKAILSARLSKSRRLENLIAQLPGEKKNGLFGNLIALSLGLTPNFKSNFDLAEDAKLQLSKDTYDDDLDNLLAQIGDQYADLFLAAKNLSDAILLSDILRVNTEITKAPLSASMIKRYDEHHQDLTLLKALVRQQLPEKYKEIFFDQSKNGYAGYIDGGASQEEFYKFIKPILEKMDGTEELLVKLNREDLLRKQRTFDNGSIPHQIHLGELHAILRRQEDFYPFLKDNREKIEKILTFRIPYYVGPLARGNSRFAWMTRKSEETITPWNFEEVVDKGASAQSFIERMTNFDKNLPNEKVLPKHSLLYEYFTVYNELTKVKYVTEGMRKPAFLSGEQKKAIVDLLFKTNRKVTVKQLKEDYFKKIECFDSVEISGVEDRFNASLGTYHDLLKIIKDKDFLDNEENEDILEDIVLTLTLFEDREMIEERLKTYAHLFDDKVMKQLKRRRYTGWGRLSRKLINGIRDKQSGKTILDFLKSDGFANRNFMQLIHDDSLTFKEDIQKAQVSGQGDSLHEHIANLAGSPAIKKGILQTVKVVDELVKVMGRHKPENIVIEMARENQTTQKGQKNSRERMKRIEEGIKELGSQILKEHPVENTQLQNEKLYLYYLQNGRDMYVDQELDINRLSDYDVDHIVPQSFLKDDSIDNKVLTRSDKARGKSDNVPSEEVVKKMKNYWRQLLNAKLITQRKFDNLTKAERGGLSELDKAGFIKRQLVETRQITKHVAQILDSRMNTKYDENDKLIREVKVITLKSKLVSDFRKDFQFYKVREINNYHHAHDAYLNAVVGTALIKKYPKLESEFVYGDYKVYDVRKMIAKSEQEIGKATAKYFFYSNIMNFFKTEITLANGEIRKRPLIETNGETGEIVWDKGRDFATVRKVLSMPQVNIVKKTEVQTGGFSKESILPKRNSDKLIARKKDWDPKKYGGFDSPTVAYSVLVVAKVEKGKSKKLKSVKELLGITIMERSSFEKNPIDFLEAKGYKEVKKDLIIKLPKYSLFELENGRKRMLASAGELQKGNELALPSKYVNFLYLASHYEKLKGSPEDNEQKQLFVEQHKHYLDEIIEQISEFSKRVILADANLDKVLSAYNKHRDKPIREQAENIIHLFTLTNLGAPAAFKYFDTTIDRKRYTSTKEVLDATLIHQSITGLYETRIDLSQLGGDGGPAPGGSGSSGGTLNIEDEYRLHETSKEPDVPLGSTWLSDFPQAWAETGGMGLAVRQAPLIIPLKATSTPVSIKQYPMSQEARLGIKPHIQRLLDQGILVPCQSPWNTPLLPVKKPGTNDYRPVQDLREVNKRVEDIHPTVPNPYNLLSGLPPSHQWYTVLDLKDAFFCLRLHPTSQPLFAFEWRDPEMGISGQLTWTRLPQGFKNSPTLFNEALHRDLADFRIQHPDLILLQYVDDLLLAATSEQDCQRGTRALLQTLGNLGYRASAKKAQICQKQVKYLGYLLKEGQRWLTEARKETVMGQPTPKTPRQLREFLGKAGFCRLFIPGFAEMAAPLYPLTKPGTLFNWGPDQQKAYQEIKQALLTAPALGLPDLTKPFELFVDEKQGYAKGVLTQKLGPWRRPVAYLSKKLDPVAAGWPPCLRMVAAIAVLTKDAGKLTMGQPLVILAPHAVEALVKQPPDRWLSNARMTHYQAMLLDTDRVQFGPVVALNPATLLPLPEKEAPHDCLEILAETHGTRPDLTDQPIPDADYTWYTDGSSFLQEGQRRAGAAVTTETEVIWARALPAGTSAQRAELIALTQALKMAEGKKLNVYTDSRYAFATAHVHGEIYRRRGWLTSEGREIKNKNEILALLKALFLPKRLSIIHCPGHQKGNSAEARGNRMADQAAREAAMKAVLETSTLLAGKRTADGSEFEKRTADGSEFESPKKKAKVE

SEQ ID NO: 7181 - protein, 2096 aa, synthetic construct
MPAAKRVKLDGGDKKYSIGLDIGTNSVGWAVITDEYKVPSKKFKVLGNTDRHSIKKNLIGALLFDSGETAEATRLKRTARRRYTRRKNRICYLQEIFSNEMAKVDDSFFHRLEESFLVEEDKKHERHPIFGNIVDEVAYHEKYPTIYHLRKKLVDSTDKADLRLIYLALAHMIKFRGHFLIEGDLNPDNSDVDKLFIQLVQTYNQLFEENPINASGVDAKAILSARLSKSRRLENLIAQLPGEKKNGLFGNLIALSLGLTPNFKSNFDLAEDAKLQLSKDTYDDDLDNLLAQIGDQYADLFLAAKNLSDAILLSDILRVNTEITKAPLSASMIKRYDEHHQDLTLLKALVRQQLPEKYKEIFFDQSKNGYAGYIDGGASQEEFYKFIKPILEKMDGTEELLVKLNREDLLRKQRTFDNGSIPHQIHLGELHAILRRQEDFYPFLKDNREKIEKILTFRIPYYVGPLARGNSRFAWMTRKSEETITPWNFEEVVDKGASAQSFIERMTNFDKNLPNEKVLPKHSLLYEYFTVYNELTKVKYVTEGMRKPAFLSGEQKKAIVDLLFKTNRKVTVKQLKEDYFKKIECFDSVEISGVEDRFNASLGTYHDLLKIIKDKDFLDNEENEDILEDIVLTLTLFEDREMIEERLKTYAHLFDDKVMKQLKRRRYTGWGRLSRKLINGIRDKQSGKTILDFLKSDGFANRNFMQLIHDDSLTFKEDIQKAQVSGQGDSLHEHIANLAGSPAIKKGILQTVKVVDELVKVMGRHKPENIVIEMARENQTTQKGQKNSRERMKRIEEGIKELGSQILKEHPVENTQLQNEKLYLYYLQNGRDMYVDQELDINRLSDYDVDHIVPQSFLKDDSIDNKVLTRSDKARGKSDNVPSEEVVKKMKNYWRQLLNAKLITQRKFDNLTKAERGGLSELDKAGFIKRQLVETRQITKHVAQILDSRMNTKYDENDKLIREVKVITLKSKLVSDFRKDFQFYKVREINNYHHAHDAYLNAVVGTALIKKYPKLESEFVYGDYKVYDVRKMIAKSEQEIGKATAKYFFYSNIMNFFKTEITLANGEIRKRPLIETNGETGEIVWDKGRDFATVRKVLSMPQVNIVKKTEVQTGGFSKESILPKRNSDKLIARKKDWDPKKYGGFDSPTVAYSVLVVAKVEKGKSKKLKSVKELLGITIMERSSFEKNPIDFLEAKGYKEVKKDLIIKLPKYSLFELENGRKRMLASAGELQKGNELALPSKYVNFLYLASHYEKLKGSPEDNEQKQLFVEQHKHYLDEIIEQISEFSKRVILADANLDKVLSAYNKHRDKPIREQAENIIHLFTLTNLGAPAAFKYFDTTIDRKRYTSTKEVLDATLIHQSITGLYETRIDLSQLGGDGGPAPGSSGGSGGTAPLEEEYRLFLEAPIQNVTLLEQWKREIPKVWAEINPPGLASTQAPIHVQLLSTALPVRVRQYPITLEAKRSLRETIRKFRAAGILRPVHSPWNTPLLPVRKSGTSEYRMVQDLREVNKRVETIHPTVPNPYTLLSLLPPDRIWYSVLDLKDAFFCIPLAPESQLIFAFEWADAEEGESGQLTWTRLPQGFKNSPTLFNEALNRDLQGFRLDHPSVSLLQYVDDLLIAADTQAACLSATRDLLMTLAELGYRVSGKKAQLCQEEVTYLGFKIHKGSRSLSNSRTQAILQIPVPKTKRQVREFLGTIGYCRLWIPGFAELAQPLYAATRPGNDPLVWGEKEEEAFQSLKLALTQPPALALPSLDKPFQLFVEETSGAAKGVLTQALGPWKRPVAYLSKRLDPVAAGWPRCLRAIAAAALLTREASKLTFGQDIEITSSHNLESLLRSPPDKWLTNARITQYQVLLLDPPRVRFKQTAALNPATLLPETDDTLPIHHCLDTLDSLTSTRPDLTDQPLAQAEATLFTDGSSYIRDGKRYAGAAVVTLDSVIWAEPLPIGTSAQKAELIALTKALEWSKDKSVNIYTDSRYAFATLHVHGMIYRERGWLTAGGKAIKNAPEILALLTAVWLPKRVAVMHCKGHQKDDAPTSTGNRRADEVAREVAIRPLSTQATISAGKRTADGSEFEKRTADGSEFESPKKKAKVE

SEQ ID NO: 7182 - protein, 2093 aa, synthetic construct
MPAAKRVKLDGGDKKYSIGLDIGTNSVGWAVITDEYKVPSKKFKVLGNTDRHSIKKNLIGALLFDSGETAEATRLKRTARRRYTRRKNRICYLQEIFSNEMAKVDDSFFHRLEESFLVEEDKKHERHPIFGNIVDEVAYHEKYPTIYHLRKKLVDSTDKADLRLIYLALAHMIKFRGHFLIEGDLNPDNSDVDKLFIQLVQTYNQLFEENPINASGVDAKAILSARLSKSRRLENLIAQLPGEKKNGLFGNLIALSLGLTPNFKSNFDLAEDAKLQLSKDTYDDDLDNLLAQIGDQYADLFLAAKNLSDAILLSDILRVNTEITKAPLSASMIKRYDEHHQDLTLLKALVRQQLPEKYKEIFFDQSKNGYAGYIDGGASQEEFYKFIKPILEKMDGTEELLVKLNREDLLRKQRTFDNGSIPHQIHLGELHAILRRQEDFYPFLKDNREKIEKILTFRIPYYVGPLARGNSRFAWMTRKSEETITPWNFEEVVDKGASAQSFIERMTNFDKNLPNEKVLPKHSLLYEYFTVYNELTKVKYVTEGMRKPAFLSGEQKKAIVDLLFKTNRKVTVKQLKEDYFKKIECFDSVEISGVEDRFNASLGTYHDLLKIIKDKDFLDNEENEDILEDIVLTLTLFEDREMIEERLKTYAHLFDDKVMKQLKRRRYTGWGRLSRKLINGIRDKQSGKTILDFLKSDGFANRNFMQLIHDDSLTFKEDIQKAQVSGQGDSLHEHIANLAGSPAIKKGILQTVKVVDELVKVMGRHKPENIVIEMARENQTTQKGQKNSRERMKRIEEGIKELGSQILKEHPVENTQLQNEKLYLYYLQNGRDMYVDQELDINRLSDYDVDHIVPQSFLKDDSIDNKVLTRSDKARGKSDNVPSEEVVKKMKNYWRQLLNAKLITQRKFDNLTKAERGGLSELDKAGFIKRQLVETRQITKHVAQILDSRMNTKYDENDKLIREVKVITLKSKLVSDFRKDFQFYKVREINNYHHAHDAYLNAVVGTALIKKYPKLESEFVYGDYKVYDVRKMIAKSEQEIGKATAKYFFYSNIMNFFKTEITLANGEIRKRPLIETNGETGEIVWDKGRDFATVRKVLSMPQVNIVKKTEVQTGGFSKESILPKRNSDKLIARKKDWDPKKYGGFDSPTVAYSVLVVAKVEKGKSKKLKSVKELLGITIMERSSFEKNPIDFLEAKGYKEVKKDLIIKLPKYSLFELENGRKRMLASAGELQKGNELALPSKYVNFLYLASHYEKLKGSPEDNEQKQLFVEQHKHYLDEIIEQISEFSKRVILADANLDKVLSAYNKHRDKPIREQAENIIHLFTLTNLGAPAAFKYFDTTIDRKRYTSTKEVLDATLIHQSITGLYETRIDLSQLGGDGGPAPGSSGGSGGTLQLEEEYRLFEPESTQKQEMDIWLKNFPQAWAETGGMGTAHCQAPVLIQLKATATPISIRQYPMPHEAYQGIKPHIRRMLDQGILKPCQSPWNTPLLPVKKPGTEDYRPVQDLREVNKRVEDIHPTVPNPYNLLSTLPPSHPWYTVLDLKDAFFCLRLHSESQLLFAFEWRDPEIGLSGQLTWTRLPQGFKNSPTLFNEALHSDLADFRVRYPALVLLQYVDDLLLAAATRTECLEGTKALLETLGNKGYRASAKKAQICLQEVTYLGYSLKDGQRWLTKARKEAILSIPVPKNSRQVREFLGTAGYCRLWIPGFAELAAPLYPLTRPGTLFQWGTEQQLAFEDIKKALLSSPALGLPDITKPFELFIDENSGFAKGVLVQKLGPWKRPVAYLSKKLDTVASGWPPCLRMVAAIAILVKDAGKLTLGQPLTILTSHPVEALVRQPPNKWLSNARMTHYQAMLLDAERVHFGPTVSLNPATLLPLPSGGNHHDCLQILAETHGTRPDLTDQPLPDADLTWYTDGSSFIRNGEREAGAAVTTESEVIWAAPLPPGTSAQRAELIALTQALKMAEGKKLTVYTDSRYAFATTHVHGEIYRRRGWLTSEGKEIKNKNEILALLEALFLPKRLSIIHCPGHQKGDSPQAKGNRLADDTAKKAATETHSSLTVLPAGKRTADGSEFEKRTADGSEFESPKKKAKVE

SEQ ID NO: 7183 - protein, 2216 aa, synthetic construct
MPAAKRVKLDGGDKKYSIGLDIGTNSVGWAVITDEYKVPSKKFKVLGNTDRHSIKKNLIGALLFDSGETAEATRLKRTARRRYTRRKNRICYLQEIFSNEMAKVDDSFFHRLEESFLVEEDKKHERHPIFGNIVDEVAYHEKYPTIYHLRKKLVDSTDKADLRLIYLALAHMIKFRGHFLIEGDLNPDNSDVDKLFIQLVQTYNQLFEENPINASGVDAKAILSARLSKSRRLENLIAQLPGEKKNGLFGNLIALSLGLTPNFKSNFDLAEDAKLQLSKDTYDDDLDNLLAQIGDQYADLFLAAKNLSDAILLSDILRVNTEITKAPLSASMIKRYDEHHQDLTLLKALVRQQLPEKYKEIFFDQSKNGYAGYIDGGASQEEFYKFIKPILEKMDGTEELLVKLNREDLLRKQRTFDNGSIPHQIHLGELHAILRRQEDFYPFLKDNREKIEKILTFRIPYYVGPLARGNSRFAWMTRKSEETITPWNFEEVVDKGASAQSFIERMTNFDKNLPNEKVLPKHSLLYEYFTVYNELTKVKYVTEGMRKPAFLSGEQKKAIVDLLFKTNRKVTVKQLKEDYFKKIECFDSVEISGVEDRFNASLGTYHDLLKIIKDKDFLDNEENEDILEDIVLTLTLFEDREMIEERLKTYAHLFDDKVMKQLKRRRYTGWGRLSRKLINGIRDKQSGKTILDFLKSDGFANRNFMQLIHDDSLTFKEDIQKAQVSGQGDSLHEHIANLAGSPAIKKGILQTVKVVDELVKVMGRHKPENIVIEMARENQTTQKGQKNSRERMKRIEEGIKELGSQILKEHPVENTQLQNEKLYLYYLQNGRDMYVDQELDINRLSDYDVDHIVPQSFLKDDSIDNKVLTRSDKARGKSDNVPSEEVVKKMKNYWRQLLNAKLITQRKFDNLTKAERGGLSELDKAGFIKRQLVETRQITKHVAQILDSRMNTKYDENDKLIREVKVITLKSKLVSDFRKDFQFYKVREINNYHHAHDAYLNAVVGTALIKKYPKLESEFVYGDYKVYDVRKMIAKSEQEIGKATAKYFFYSNIMNFFKTEITLANGEIRKRPLIETNGETGEIVWDKGRDFATVRKVLSMPQVNIVKKTEVQTGGFSKESILPKRNSDKLIARKKDWDPKKYGGFDSPTVAYSVLVVAKVEKGKSKKLKSVKELLGITIMERSSFEKNPIDFLEAKGYKEVKKDLIIKLPKYSLFELENGRKRMLASAGELQKGNELALPSKYVNFLYLASHYEKLKGSPEDNEQKQLFVEQHKHYLDEIIEQISEFSKRVILADANLDKVLSAYNKHRDKPIREQAENIIHLFTLTNLGAPAAFKYFDTTIDRKRYTSTKEVLDATLIHQSITGLYETRIDLSQLGGDGGPAPGSSGGSGGTLGDQGSRGSDPLPEPRVTLTVEGIPTEFLVNTGAEHSVLTKPMGKMGSKRTVVAGATGSKVYPWTTKRLLKIGQKQVTHSFLVIPECPAPLLGRDLLTKLKAQIQFSTEGPQVTWEDRPAMCLVLNLEEEYRLHEKPVPPSIDPSWLQLFPMVWAEKAGMGLANQVPPVVVELKSDASPVAVRQYPMSKEAREGIRPHIQRFLDLGILVPCQSPWNTPLLPVKKPGTNDYRPVQDLREVNKRVQDIHPTVPNPYNLLSSLPPSHTWYSVLDLKDAFFCLKLHPNSQPLFAFEWRDPEKGNTGQLTWTRLPQGFKNSPTLFDEALHRDLASFRALNPQVVMLQYVDDLLVAAPTYRDCKEGTRRLLQELSKLGYRVSAKKAQLCREEVTYLGYLLKGGKRWLTPARKATVMKIPTPTTPRQVREFLGTAGFCRLWIPGFASLAAPLYPLTREKVPFTWTEAHQEAFGRIKEALLSAPALALPDLTKPFALYVDEKEGVARGVLTQTLGPWRRPVAYLSKKLDPVASGWPTCLKAIAAVALLLKDADKLTLGQNVLVIAPHNLESIVRQPPDRWMTNARMTHYQSLLLNERVSFAPPAILNPATLLPVESDDTPIHICSEILAEETGTRPDLRDQPLPGVPAWYTDGSSFIMDGRRQAGAAIVDNKRTVWASNLPEGTSAQKAELIALTQALRLAEGKSINIYTDSRYAFATAHVHGAIYKQRGLLTSAGKDIKNKEEILALLEAIHLPKRVAIIHCPGHQRGTDPVATGNRKADEAAKQAAQSTRILTETTKNAGKRTADGSEFEKRTADGSEFESPKKKAKVE

SEQ ID NO: 7184 - protein, 2216 aa, synthetic construct
MPAAKRVKLDGGDKKYSIGLDIGTNSVGWAVITDEYKVPSKKFKVLGNTDRHSIKKNLIGALLFDSGETAEATRLKRTARRRYTRRKNRICYLQEIFSNEMAKVDDSFFHRLEESFLVEEDKKHERHPIFGNIVDEVAYHEKYPTIYHLRKKLVDSTDKADLRLIYLALAHMIKFRGHFLIEGDLNPDNSDVDKLFIQLVQTYNQLFEENPINASGVDAKAILSARLSKSRRLENLIAQLPGEKKNGLFGNLIALSLGLTPNFKSNFDLAEDAKLQLSKDTYDDDLDNLLAQIGDQYADLFLAAKNLSDAILLSDILRVNTEITKAPLSASMIKRYDEHHQDLTLLKALVRQQLPEKYKEIFFDQSKNGYAGYIDGGASQEEFYKFIKPILEKMDGTEELLVKLNREDLLRKQRTFDNGSIPHQIHLGELHAILRRQEDFYPFLKDNREKIEKILTFRIPYYVGPLARGNSRFAWMTRKSEETITPWNFEEVVDKGASAQSFIERMTNFDKNLPNEKVLPKHSLLYEYFTVYNELTKVKYVTEGMRKPAFLSGEQKKAIVDLLFKTNRKVTVKQLKEDYFKKIECFDSVEISGVEDRFNASLGTYHDLLKIIKDKDFLDNEENEDILEDIVLTLTLFEDREMIEERLKTYAHLFDDKVMKQLKRRRYTGWGRLSRKLINGIRDKQSGKTILDFLKSDGFANRNFMQLIHDDSLTFKEDIQKAQVSGQGDSLHEHIANLAGSPAIKKGILQTVKVVDELVKVMGRHKPENIVIEMARENQTTQKGQKNSRERMKRIEEGIKELGSQILKEHPVENTQLQNEKLYLYYLQNGRDMYVDQELDINRLSDYDVDHIVPQSFLKDDSIDNKVLTRSDKARGKSDNVPSEEVVKKMKNYWRQLLNAKLITQRKFDNLTKAERGGLSELDKAGFIKRQLVETRQITKHVAQILDSRMNTKYDENDKLIREVKVITLKSKLVSDFRKDFQFYKVREINNYHHAHDAYLNAVVGTALIKKYPKLESEFVYGDYKVYDVRKMIAKSEQEIGKATAKYFFYSNIMNFFKTEITLANGEIRKRPLIETNGETGEIVWDKGRDFATVRKVLSMPQVNIVKKTEVQTGGFSKESILPKRNSDKLIARKKDWDPKKYGGFDSPTVAYSVLVVAKVEKGKSKKLKSVKELLGITIMERSSFEKNPIDFLEAKGYKEVKKDLIIKLPKYSLFELENGRKRMLASAGELQKGNELALPSKYVNFLYLASHYEKLKGSPEDNEQKQLFVEQHKHYLDEIIEQISEFSKRVILADANLDKVLSAYNKHRDKPIREQAENIIHLFTLTNLGAPAAFKYFDTTIDRKRYTSTKEVLDATLIHQSITGLYETRIDLSQLGGDGGPAPGSSGGSGGTLGDQGSRGSDPLPEPRVTLTVEGIPTEFLVNTGAEHSVLTKPMGKMGSKRTVVAGATGSKVYPWTTKRLLKIGQKQVTHSFLVIPECPAPLLGRDLLTKLKAQIQFSTEGPQVTWEDRPAMCLVLNLEEEYRLHEKPVPPSIDPSWLQLFPMVWAEKAGMGLANQVPPVVVELKSDASPVAVRQYPMSKEAREGIRPHIQRFLDLGILVPCQSPWNTPLLPVKKPGTNDYRPVQDLREVNKRVQDIHPTVPNPYNLLSSLPPSHTWYSVLDLKDAFFCLKLHPNSQPLFAFEWRDPEKGNTGQLTWTRLPQGFKNSPTLFNEALHRDLASFRALNPQVVMLQYVDDLLVAAPTYRDCKEGTRRLLQELSKLGYRVSAKKAQLCREEVTYLGYLLKGGKRWLTPARKATVMKIPTPTTPRQVREFLGKAGFCRLFIPGFASLAAPLYPLTRPKVPFTWTEAHQEAFGRIKEALLSAPALALPDLTKPFALYVDEKEGVARGVLTQTLGPWRRPVAYLSKKLDPVASGWPTCLKAIAAVALLLKDADKLTLGQNVLVIAPHNLESIVRQPPDRWMTNARMTHYQSLLLNERVSFAPPAILNPATLLPVESDDTPIHICSEILAEETGTRPDLRDQPLPGVPAWYTDGSSFIMDGRRQAGAAIVDNKRTVWASNLPEGTSAQKAELIALTQALRLAEGKSINIYTDSRYAFATAHVHGAIYKQRGWLTSAGKDIKNKEEILALLEAIHLPKRVAIIHCPGHQRGTDPVATGNRKADEAAKQAAQSTRILTETTKNAGKRTADGSEFEKRTADGSEFESPKKKAKVE

SEQ ID NO: 7185 - protein, 2094 aa, synthetic construct
MPAAKRVKLDGGDKKYSIGLDIGTNSVGWAVITDEYKVPSKKFKVLGNTDRHSIKKNLIGALLFDSGETAEATRLKRTARRRYTRRKNRICYLQEIFSNEMAKVDDSFFHRLEESFLVEEDKKHERHPIFGNIVDEVAYHEKYPTIYHLRKKLVDSTDKADLRLIYLALAHMIKFRGHFLIEGDLNPDNSDVDKLFIQLVQTYNQLFEENPINASGVDAKAILSARLSKSRRLENLIAQLPGEKKNGLFGNLIALSLGLTPNFKSNFDLAEDAKLQLSKDTYDDDLDNLLAQIGDQYADLFLAAKNLSDAILLSDILRVNTEITKAPLSASMIKRYDEHHQDLTLLKALVRQQLPEKYKEIFFDQSKNGYAGYIDGGASQEEFYKFIKPILEKMDGTEELLVKLNREDLLRKQRTFDNGSIPHQIHLGELHAILRRQEDFYPFLKDNREKIEKILTFRIPYYVGPLARGNSRFAWMTRKSEETITPWNFEEVVDKGASAQSFIERMTNFDKNLPNEKVLPKHSLLYEYFTVYNELTKVKYVTEGMRKPAFLSGEQKKAIVDLLFKTNRKVTVKQLKEDYFKKIECFDSVEISGVEDRFNASLGTYHDLLKIIKDKDFLDNEENEDILEDIVLTLTLFEDREMIEERLKTYAHLFDDKVMKQLKRRRYTGWGRLSRKLINGIRDKQSGKTILDFLKSDGFANRNFMQLIHDDSLTFKEDIQKAQVSGQGDSLHEHIANLAGSPAIKKGILQTVKVVDELVKVMGRHKPENIVIEMARENQTTQKGQKNSRERMKRIEEGIKELGSQILKEHPVENTQLQNEKLYLYYLQNGRDMYVDQELDINRLSDYDVDHIVPQSFLKDDSIDNKVLTRSDKARGKSDNVPSEEVVKKMKNYWRQLLNAKLITQRKFDNLTKAERGGLSELDKAGFIKRQLVETRQITKHVAQILDSRMNTKYDENDKLIREVKVITLKSKLVSDFRKDFQFYKVREINNYHHAHDAYLNAVVGTALIKKYPKLESEFVYGDYKVYDVRKMIAKSEQEIGKATAKYFFYSNIMNFFKTEITLANGEIRKRPLIETNGETGEIVWDKGRDFATVRKVLSMPQVNIVKKTEVQTGGFSKESILPKRNSDKLIARKKDWDPKKYGGFDSPTVAYSVLVVAKVEKGKSKKLKSVKELLGITIMERSSFEKNPIDFLEAKGYKEVKKDLIIKLPKYSLFELENGRKRMLASAGELQKGNELALPSKYVNFLYLASHYEKLKGSPEDNEQKQLFVEQHKHYLDEIIEQISEFSKRVILADANLDKVLSAYNKHRDKPIREQAENIIHLFTLTNLGAPAAFKYFDTTIDRKRYTSTKEVLDATLIHQSITGLYETRIDLSQLGGDGGPAPGSSGGSGGLGIEDEYRLHETSTEPDVSLGSTWLSDFPQAWAETGGMGLAVRQAPLIIPLKATSTPVSIQQYPMSHEARLGIKPHIQRLLDQGILVPCQSPWNTPLLPVKKPGTNDYRPVQDLREVNKRVEDIHPTVPNPYNLLSGLPPSHQWYTVLDLKDAFFCLRLHPTSQPLFAFEWRDPGMGISGQLTWTRLPQGFKNSPTLFNEALHRDLADFRIQHPDLILLQYVDDILLAATSELDCQQGTRALLQTLGDLGYRASAKKAQICQKQVKYLGYLLREGQRWLTEARKETVMGQPVPKTPRQLREFLGKAGFCRLFIPGFAEMAAPLYPLTKPGTLFSWGPDQQKAYQEIKQALLTAPALGLPDLTKPFELFVDEKQGYAKGVLTQKLGPWRRPVAYLSKKLDPVAAGWPPCLRMVAAIAVLTKDAGKLTMGQPLVILAPHAVEALVKQPPDRWLSNARMTHYQAMLLDTDRVQFGPVVALNPATLLPLPEEGAPHDCLEILAETHGTRPDLTDQPIPDADHTWYTDGSSFLQEGQRKAGAAVTTETEVIWAGALPAGTSAQRAELIALTQALKMAEGKRLNVYTDSRYAFATAHIHGEIYRRRGWLTSEGREIKNKSEILALLKALFLPKRLSIIHCLGHQKGDSAEARGNRLADQAAREAAIKTPPDTSTLLIAGKRTADGSEFEKRTADGSEFESPKKKAKVE

SEQ ID NO: 7186 - protein, 2094 aa, synthetic construct; identical to SEQ ID NO: 7185

SEQ ID NO: 7187 - protein, 2088 aa, synthetic construct
MPAAKRVKLDGGDKKYSIGLDIGTNSVGWAVITDEYKVPSKKFKVLGNTDRHSIKKNLIGALLFDSGETAEATRLKRTARRRYTRRKNRICYLQEIFSNEMAKVDDSFFHRLEESFLVEEDKKHERHPIFGNIVDEVAYHEKYPTIYHLRKKLVDSTDKADLRLIYLALAHMIKFRGHFLIEGDLNPDNSDVDKLFIQLVQTYNQLFEENPINASGVDAKAILSARLSKSRRLENLIAQLPGEKKNGLFGNLIALSLGLTPNFKSNFDLAEDAKLQLSKDTYDDDLDNLLAQIGDQYADLFLAAKNLSDAILLSDILRVNTEITKAPLSASMIKRYDEHHQDLTLLKALVRQQLPEKYKEIFFDQSKNGYAGYIDGGASQEEFYKFIKPILEKMDGTEELLVKLNREDLLRKQRTFDNGSIPHQIHLGELHAILRRQEDFYPFLKDNREKIEKILTFRIPYYVGPLARGNSRFAWMTRKSEETITPWNFEEVVDKGASAQSFIERMTNFDKNLPNEKVLPKHSLLYEYFTVYNELTKVKYVTEGMRKPAFLSGEQKKAIVDLLFKTNRKVTVKQLKEDYFKKIECFDSVEISGVEDRFNASLGTYHDLLKIIKDKDFLDNEENEDILEDIVLTLTLFEDREMIEERLKTYAHLFDDKVMKQLKRRRYTGWGRLSRKLINGIRDKQSGKTILDFLKSDGFANRNFMQLIHDDSLTFKEDIQKAQVSGQGDSLHEHIANLAGSPAIKKGILQTVKVVDELVKVMGRHKPENIVIEMARENQTTQKGQKNSRERMKRIEEGIKELGSQILKEHPVENTQLQNEKLYLYYLQNGRDMYVDQELDINRLSDYDVDHIVPQSFLKDDSIDNKVLTRSDKARGKSDNVPSEEVVKKMKNYWRQLLNAKLITQRKFDNLTKAERGGLSELDKAGFIKRQLVETRQITKHVAQILDSRMNTKYDENDKLIREVKVITLKSKLVSDFRKDFQFYKVREINNYHHAHDAYLNAVVGTALIKKYPKLESEFVYGDYKVYDVRKMIAKSEQEIGKATAKYFFYSNIMNFFKTEITLANGEIRKRPLIETNGETGEIVWDKGRDFATVRKVLSMPQVNIVKKTEVQTGGFSKESILPKRNSDKLIARKKDWDPKKYGGFDSPTVAYSVLVVAKVEKGKSKKLKSVKELLGITIMERSSFEKNPIDFLEAKGYKEVKKDLIIKLPKYSLFELENGRKRMLASAGELQKGNELALPSKYVNFLYLASHYEKLKGSPEDNEQKQLFVEQHKHYLDEIIEQISEFSKRVILADANLDKVLSAYNKHRDKPIREQAENIIHLFTLTNLGAPAAFKYFDTTIDRKRYTSTKEVLDATLIHQSITGLYETRIDLSQLGGDGGPAPGSSGGSGGTLQLDDEYRLYSPLVKPDQNIQFWLEQFPQAWAETAGMGLAKQVPPQVIQLKASATPVSVRQYPLSKEAQEGIRPHVQRLIQQGILVPVQSPWNTPLLPVRKPGTNDYRPVQDLREVNKRVQDIHPTVPNPYNLLCALPPQRSWYTVLDLKDAFFCLRLHPTSQPLFAFEWRDPGTGRTGQLTWTRLPQGFKNSPTIFDEALHRDLANFRIQHPQVTLLQYVDDLLLAGATKQDCLEGTKALLLELSDLGYRASAKKAQICRREVTYLGYSLRDGQRWLTEARKKTVVQIPAPTTAKQVREFLGTAGFCRLWIPGFATLAAPLYPLTKEKGEFSWAPEHQKAFDAIKKALLSAPALALPDVTKPFTLYVDERKGVARGVLTQTLGPWRRPVAYLSKKLDPVASGWPVCLKAIAAVAILVKDADKLTLGQNITVIAPHALENIVRQPPDRWMTNARMTHYQSLLLTERVTFAPPAALNPATLLPEETDEPVTHDCHQLLIEETGVRKDLTDIPLTGEVLTWFTDGSSYVVEGKRMAGAAVVDGTRTIWASSLPEGTSAQKAELMALTQALRLAEGKSINIYTDSRYAFATAHVHGAIYKQRGLLTSAGREIKNKEEILSLLEALHLPKRLAIIHCPGHQKAKDPISRGNQMADRVAKQAAQGVNLLAGKRTADGSEFEKRTADGSEFESPKKKAKVE

SEQ ID NO: 7188 - protein, 2085 aa, synthetic construct
MPAAKRVKLDGGDKKYSIGLDIGTNSVGWAVITDEYKVPSKKFKVLGNTDRHSIKKNLIGALLFDSGETAEATRLKRTARRRYTRRKNRICYLQEIFSNEMAKVDDSFFHRLEESFLVEEDKKHERHPIFGNIVDEVAYHEKYPTIYHLRKKLVDSTDKADLRLIYLALAHMIKFRGHFLIEGDLNPDNSDVDKLFIQLVQTYNQLFEENPINASGVDAKAILSARLSKSRRLENLIAQLPGEKKNGLFGNLIALSLGLTPNFKSNFDLAEDAKLQLSKDTYDDDLDNLLAQIGDQYADLFLAAKNLSDAILLSDILRVNTEITKAPLSASMIKRYDEHHQDLTLLKALVRQQLPEKYKEIFFDQSKNGYAGYIDGGASQEEFYKFIKPILEKMDGTEELLVKLNREDLLRKQRTFDNGSIPHQIHLGELHAILRRQEDFYPFLKDNREKIEKILTFRIPYYVGPLARGNSRFAWMTRKSEETITPWNFEEVVDKGASAQSFIERMTNFDKNLPNEKVLPKHSLLYEYFTVYNELTKVKYVTEGMRKPAFLSGEQKKAIVDLLFKTNRKVTVKQLKEDYFKKIECFDSVEISGVEDRFNASLGTYHDLLKIIKDKDFLDNEENEDILEDIVLTLTLFEDREMIEERLKTYAHLFDDKVMKQLKRRRYTGWGRLSRKLINGIRDKQSGKTILDFLKSDGFANRNFMQLIHDDSLTFKEDIQKAQVSGQGDSLHEHIANLAGSPAIKKGILQTVKVVDELVKVMGRHKPENIVIEMARENQTTQKGQKNSRERMKRIEEGIKELGSQILKEHPVENTQLQNEKLYLYYLQNGRDMYVDQELDINRLSDYDVDHIVPQSFLKDDSIDNKVLTRSDKARGKSDNVPSEEVVKKMKNYWRQLLNAKLITQRKFDNLTKAERGGLSELDKAGFIKRQLVETRQITKHVAQILDSRMNTKYDENDKLIREVKVITLKSKLVSDFRKDFQFYKVREINNYHHAHDAYLNAVVGTALIKKYPKLESEFVYGDYKVYDVRKMIAKSEQEIGKATAKYFFYSNIMNFFKTEITLANGEIRKRPLIETNGETGEIVWDKGRDFATVRKVLSMPQVNIVKKTEVQTGGFSKESILPKRNSDKLIARKKDWDPKKYGGFDSPTVAYSVLVVAKVEKGKSKKLKSVKELLGITIMERSSFEKNPIDFLEAKGYKEVKKDLIIKLPKYSLFELENGRKRMLASAGELQKGNELALPSKYVNFLYLASHYEKLKGSPEDNEQKQLFVEQHKHYLDEIIEQISEFSKRVILADANLDKVLSAYNKHRDKPIREQAENIIHLFTLTNLGAPAAFKYFDTTIDRKRYTSTKEVLDATLIHQSITGLYETRIDLSQLGGDGGPAPGSSGGSGGIPWLMKKPLQLTTLVPLQEYEERLLKQTMLTGSYKEKLQSLFLKYDALWQHWENQVGHRRIKPHHIATGTVNPRPQKQYPINPKAKASIQTVINDLLKQGVLIQQNSIMNTPVYPVPKPDGKWRMVLDYREVNKTIPLIAAQNQHSAGILSSIFRGKYKTTLDLSNGFWAHSITPESYWLTAFTWLGQQYCWTRLPQGFLNSPALFNADVVDLLKEVPNVQVYVDDIYISHDDPREHLEQLEKVFSLLLNAGYVVSLKKSEIAQHEVEFLGFNITKEGRGLTETFKQKLLNITPPRDLKQLQSILGKLNFARNFIPNFSELVKPLYNIIATAPGKYITWTTDNSQQLQNIISMLNSAENLEERNPEVRLIMKVNTSPSAGYIRFYNEFAKRPIMYLNYVYTKAEVKFTNTEKLLTTIHKGLIKALDLGMGQEILVYSPIVSMTKIQKTPLPERKALPIRWITWMSYLEDPRIQFHYDKTLPELQQVPTVTDDIIAKIKHPSEFSMVFYTDGSAIKHPNVNKSHNAGMGIAQVQFKPEFTVINTWSIPLGDHTAQLAEVAAVEFACKKALKIDGPVLIVTDSFYVAESVNKELPYWQSNGFFNNKKKPLKHVSKWKSIADCIQLKPDIIIIHEKGHQPTASTFHTEGNNLADKLATQGSYVVNAGKRTADGSEFEKRTADGSEFESPKKKAKVE

SEQ ID NO: 7189 - protein, 2174 aa, synthetic construct
MPAAKRVKLDGGDKKYSIGLDIGTNSVGWAVITDEYKVPSKKFKVLGNTDRHSIKKNLIGALLFDSGETAEATRLKRTARRRYTRRKNRICYLQEIFSNEMAKVDDSFFHRLEESFLVEEDKKHERHPIFGNIVDEVAYHEKYPTIYHLRKKLVDSTDKADLRLIYLALAHMIKFRGHFLIEGDLNPDNSDVDKLFIQLVQTYNQLFEENPINASGVDAKAILSARLSKSRRLENLIAQLPGEKKNGLFGNLIALSLGLTPNFKSNFDLAEDAKLQLSKDTYDDDLDNLLAQIGDQYADLFLAAKNLSDAILLSDILRVNTEITKAPLSASMIKRYDEHHQDLTLLKALVRQQLPEKYKEIFFDQSKNGYAGYIDGGASQEEFYKFIKPILEKMDGTEELLVKLNREDLLRKQRTFDNGSIPHQIHLGELHAILRRQEDFYPFLKDNREKIEKILTFRIPYYVGPLARGNSRFAWMTRKSEETITPWNFEEVVDKGASAQSFIERMTNFDKNLPNEKVLPKHSLLYEYFTVYNELTKVKYVTEGMRKPAFLSGEQKKAIVDLLFKTNRKVTVKQLKEDYFKKIECFDSVEISGVEDRFNASLGTYHDLLKIIKDKDFLDNEENEDILEDIVLTLTLFEDREMIEERLKTYAHLFDDKVMKQLKRRRYTGWGRLSRKLINGIRDKQSGKTILDFLKSDGFANRNFMQLIHDDSLTFKEDIQKAQVSGQGDSLHEHIANLAGSPAIKKGILQTVKVVDELVKVMGRHKPENIVIEMARENQTTQKGQKNSRERMKRIEEGIKELGSQILKEHPVENTQLQNEKLYLYYLQNGRDMYVDQELDINRLSDYDVDHIVPQSFLKDDSIDNKVLTRSDKARGKSDNVPSEEVVKKMKNYWRQLLNAKLITQRKFDNLTKAERGGLSELDKAGFIKRQLVETRQITKHVAQILDSRMNTKYDENDKLIREVKVITLKSKLVSDFRKDFQFYKVREINNYHHAHDAYLNAVVGTALIKKYPKLESEFVYGDYKVYDVRKMIAKSEQEIGKATAKYFFYSNIMNFFKTEITLANGEIRKRPLIETNGETGEIVWDKGRDFATVRKVLSMPQVNIVKKTEVQTGGFSKESILPKRNSDKLIARKKDWDPKKYGGFDSPTVAYSVLVVAKVEKGKSKKLKSVKELLGITIMERSSFEKNPIDFLEAKGYKEVKKDLIIKLPKYSLFELENGRKRMLASAGELQKGNELALPSKYVNFLYLASHYEKLKGSPEDNEQKQLFVEQHKHYLDEIIEQISEFSKRVILADANLDKVLSAYNKHRDKPIREQAENIIHLFTLTNLGAPAAFKYFDTTIDRKRYTSTKEVLDATLIHQSITGLYETRIDLSQLGGDGGPAPGSSGGSGGMDPLQLLQPLEAEIKGTKLKAHWNSGATITCVPQAFLEEEVPIKNIWIKTIHGEKEQPVYYLTFKIQGRKVEAEVISSPYDYILVSPSDIPWLMKKPLQLTTLVPLQEYEERLLKQTMLTGSYKEKLQSLFLKYDALWQHWENQVGHRRIKPHHIATGTVNPRPQKQYPINPKAKASIQTVINDLLKQGVLIQQNSIMNTPVYPVPKPDGKWRMVLDYREVNKTIPLIAAQNQHSAGILSSIFRGKYKTTLDLSNGFWAHSITPESYWLTAFTWLGQQYCWTRLPQGFLNSPALFNADVVDLLKEVPNVQVYVDDIYISHDDPREHLEQLEKVFSLLLNAGYVVSLKKSEIAQHEVEFLGFNITKEGRGLTETFKQKLLNITPPRDLKQLQSILGLLNFARNFIPNFSELVKPLYNIIATAPGKYITWTTDNSQQLQNIISMLNSAENLEERNPEVRLIMKVNTSPSAGYIRFYNEFAKRPIMYLNYVYTKAEVKFTNTEKLLTTIHKGLIKALDLGMGQEILVYSPIVSMTKIQKTPLPERKALPIRWITWMSYLEDPRIQFHYDKTLPELQQVPTVTDDIIAKIKHPSEFSMVFYTDGSAIKHPNVNKSHNAGMGIAQVQFKPEFTVINTWSIPLGDHTAQLAEVAAVEFACKKALKIDGPVLIVTDSFYVAESVNKELPYWQSNGFFNNKKKPLKHVSKWKSIADCIQLKPDIIIIHEKGHQPTASTFHTEGNNLADKLATQGSYVVNAGKRTADGSEFEKRTADGSEFESPKKKAKVE

SEQ ID NO: 7190 - protein, 2174 aa, synthetic construct
MPAAKRVKLDGGDKKYSIGLDIGTNSVGWAVITDEYKVPSKKFKVLGNTDRHSIKKNLIGALLFDSGETAEATRLKRTARRRYTRRKNRICYLQEIFSNEMAKVDDSFFHRLEESFLVEEDKKHERHPIFGNIVDEVAYHEKYPTIYHLRKKLVDSTDKADLRLIYLALAHMIKFRGHFLIEGDLNPDNSDVDKLFIQLVQTYNQLFEENPINASGVDAKAILSARLSKSRRLENLIAQLPGEKKNGLFGNLIALSLGLTPNFKSNFDLAEDAKLQLSKDTYDDDLDNLLAQIGDQYADLFLAAKNLSDAILLSDILRVNTEITKAPLSASMIKRYDEHHQDLTLLKALVRQQLPEKYKEIFFDQSKNGYAGYIDGGASQEEFYKFIKPILEKMDGTEELLVKLNREDLLRKQRTFDNGSIPHQIHLGELHAILRRQEDFYPFLKDNREKIEKILTFRIPYYVGPLARGNSRFAWMTRKSEETITPWNFEEVVDKGASAQSFIERMTNFDKNLPNEKVLPKHSLLYEYFTVYNELTKVKYVTEGMRKPAFLSGEQKKAIVDLLFKTNRKVTVKQLKEDYFKKIECFDSVEISGVEDRFNASLGTYHDLLKIIKDKDFLDNEENEDILEDIVLTLTLFEDREMIEERLKTYAHLFDDKVMKQLKRRRYTGWGRLSRKLINGIRDKQSGKTILDFLKSDGFANRNFMQLIHDDSLTFKEDIQKAQVSGQGDSLHEHIANLAGSPAIKKGILQTVKVVDELVKVMGRHKPENIVIEMARENQTTQKGQKNSRERMKRIEEGIKELGSQILKEHPVENTQLQNEKLYLYYLQNGRDMYVDQELDINRLSDYDVDHIVPQSFLKDDSIDNKVLTRSDKARGKSDNVPSEEVVKKMKNYWRQLLNAKLITQRKFDNLTKAERGGLSELDKAGFIKRQLVETRQITKHVAQILDSRMNTKYDENDKLIREVKVITLKSKLVSDFRKDFQFYKVREINNYHHAHDAYLNAVVGTALIKKYPKLESEFVYGDYKVYDVRKMIAKSEQEIGKATAKYFFYSNIMNFFKTEITLANGEIRKRPLIETNGETGEIVWDKGRDFATVRKVLSMPQVNIVKKTEVQTGGFSKESILPKRNSDKLIARKKDWDPKKYGGFDSPTVAYSVLVVAKVEKGKSKKLKSVKELLGITIMERSSFEKNPIDFLEAKGYKEVKKDLIIKLPKYSLFELENGRKRMLASAGELQKGNELALPSKYVNFLYLASHYEKLKGSPEDNEQKQLFVEQHKHYLDEIIEQISEFSKRVILADANLDKVLSAYNKHRDKPIREQAENIIHLFTLTNLGAPAAFKYFDTTIDRKRYTSTKEVLDATLIHQSITGLYETRIDLSQLGGDGGPAPGSSGGSGGMNPLQLLQPLPAEVKGTKLLAHWNSGATITCIPESFLEDEQPIKQTLIKTIHGEKQQNVYYLTFKVKGRKVEAEVIASPYEYILLSPTDVPWLTQQPLQLTILVPLQEYQDRILNKTALPEEQKQQLKALFTKYDNLWQHWENQVGHRKIRPHNIATGDYPPRPQKQYPINPKAKPSIQIVIDDLLKQGVLTPQNSTMNTPVYPVPKPDGRWRMVLDYREVNKTIPLTAAQNQHSAGILATIVRQKYKTTLDLANGFWAHPITPDSYWLTAFTWQGKQYCWTRLPQGFLNSPALFTADAVDLLKEVPNVQVYVDDIYLSHDNPHEHIQQLEKVFQILLQAGYVVSLKKSEIGQRTVEFLGFNITKEGRGLTDTFKTKLLNVTPPKDLKQLQSILGLLNFARNFIPNFAELVQTLYNLIASSKGKYIEWTEDNTKQLNKVIEALNTASNLEERLPDQRLVIKVNTSPSAGYVRYYNESGKKPIMYLNYVFSKAELKFSMLEKLLTTMHKALIKAMDLAMGQEILVYSPIVSMTKIQKTPLPERKALPIRWITWMTYLEDPRIQFHYDKTLPELKHIPDVYTSSIPPLKHPSQYEGVFCTDGSAIKSPDPTKSNNAGMGIVHAIYNPEYKILNQWSIPLGHHTAQMAEIAAVEFACKKALKVPGPVLVITDSFYVAESANKELPYWKSNGFVNNKKEPLKHISKWKSIAECLSIKPDITIQHEKGHQPINTSIHTEGNALADKLATQGSYVVNAGKRTADGSEFEKRTADGSEFESPKKKAKVE

SEQ ID NO: 7191 - protein, 2092 aa, synthetic construct
MPAAKRVKLDGGDKKYSIGLDIGTNSVGWAVITDEYKVPSKKFKVLGNTDRHSIKKNLIGALLFDSGETAEATRLKRTARRRYTRRKNRICYLQEIFSNEMAKVDDSFFHRLEESFLVEEDKKHERHPIFGNIVDEVAYHEKYPTIYHLRKKLVDSTDKADLRLIYLALAHMIKFRGHFLIEGDLNPDNSDVDKLFIQLVQTYNQLFEENPINASGVDAKAILSARLSKSRRLENLIAQLPGEKKNGLFGNLIALSLGLTPNFKSNFDLAEDAKLQLSKDTYDDDLDNLLAQIGDQYADLFLAAKNLSDAILLSDILRVNTEITKAPLSASMIKRYDEHHQDLTLLKALVRQQLPEKYKEIFFDQSKNGYAGYIDGGASQEEFYKFIKPILEKMDGTEELLVKLNREDLLRKQRTFDNGSIPHQIHLGELHAILRRQEDFYPFLKDNREKIEKILTFRIPYYVGPLARGNSRFAWMTRKSEETITPWNFEEVVDKGASAQSFIERMTNFDKNLPNEKVLPKHSLLYEYFTVYNELTKVKYVTEGMRKPAFLSGEQKKAIVDLLFKTNRKVTVKQLKEDYFKKIECFDSVEISGVEDRFNASLGTYHDLLKIIKDKDFLDNEENEDILEDIVLTLTLFEDREMIEERLKTYAHLFDDKVMKQLKRRRYTGWGRLSRKLINGIRDKQSGKTILDFLKSDGFANRNFMQLIHDDSLTFKEDIQKAQVSGQGDSLHEHIANLAGSPAIKKGILQTVKVVDELVKVMGRHKPENIVIEMARENQTTQKGQKNSRERMKRIEEGIKELGSQILKEHPVENTQLQNEKLYLYYLQNGRDMYVDQELDINRLSDYDVDHIVPQSFLKDDSIDNKVLTRSDKARGKSDNVPSEEVVKKMKNYWRQLLNAKLITQRKFDNLTKAERGGLSELDKAGFIKRQLVETRQITKHVAQILDSRMNTKYDENDKLIREVKVITLKSKLVSDFRKDFQFYKVREINNYHHAHDAYLNAVVGTALIKKYPKLESEFVYGDYKVYDVRKMIAKSEQEIGKATAKYFFYSNIMNFFKTEITLANGEIRKRPLIETNGETGEIVWDKGRDFATVRKVLSMPQVNIVKKTEVQTGGFSKESILPKRNSDKLIARKKDWDPKKYGGFDSPTVAYSVLVVAKVEKGKSKKLKSVKELLGITIMERSSFEKNPIDFLEAKGYKEVKKDLIIKLPKYSLFELENGRKRMLASAGELQKGNELALPSKYVNFLYLASHYEKLKGSPEDNEQKQLFVEQHKHYLDEIIEQISEFSKRVILADANLDKVLSAYNKHRDKPIREQAENIIHLFTLTNLGAPAAFKYFDTTIDRKRYTSTKEVLDATLIHQSITGLYETRIDLSQLGGDGGPAPGSSGGSGGVLNLEEEYRLHEKPVPSSIDPSWLQLFPTVWAERAGMGLANQVPPVVVELRSGASPVAVRQYPMSKEAREGIRPHIQRFLDLGVLVPCQSPWNTPLLPVKKPGTNDYRPVQDLREINKRVQDIHPTVPNPYNLLSSLPPSHTWYSVLDLKDAFFCLKLHPNSQPLFAFEWRDPEKGNTGQLTWTRLPQGFKNSPTLFNEALHRDLAPFRALNPQVVLLQYVDDLLVAAPTYRDCKEGTQKLLQELSKLGYRVSAKKAQLCQKEVTYLGYLLKEGKRWLTPARKATVMKIPPPTTPRQVREFLGTAGFCRLWIPGFASLAAPLYPLTKPSIPFIWTEEHQKAFDRIKEALLSAPALALPDLTKPFTLYVDERAGVARGVLTQTLGPWRRPVAYLSKKLDPVASGWPTCLKAVAAVALLLKDADKLTLGQNVTVIASHSLESIVRQPPDRWMTNARMTHYQSLLLNERVSFAPPAVLNPATLLPVESEATPVHRCSEILAEETGTRRDLKDQPLPGVPAWYTDGSSFIAEGKRRAGAAIVDGKRTVWASSLPEGTSAQKAELVALTQALRLAEGKDINIYTDSRYAFATAHIHGAIYKQRGWLTSAGKDIKNKEEILALLEAIHLPKRVAIIHCPGHQKGNDPVATGNRRADEAAKQAALSTRVLAETTKPAGKRTADGSEFEKRTADGSEFESPKKKAKVE

SEQ ID NO: 7192 - protein, 2092 aa, synthetic construct
MPAAKRVKLDGGDKKYSIGLDIGTNSVGWAVITDEYKVPSKKFKVLGNTDRHSIKKNLIGALLFDSGETAEATRLKRTARRRYTRRKNRICYLQEIFSNEMAKVDDSFFHRLEESFLVEEDKKHERHPIFGNIVDEVAYHEKYPTIYHLRKKLVDSTDKADLRLIYLALAHMIKFRGHFLIEGDLNPDNSDVDKLFIQLVQTYNQLFEENPINASGVDAKAILSARLSKSRRLENLIAQLPGEKKNGLFGNLIALSLGLTPNFKSNFDLAEDAKLQLSKDTYDDDLDNLLAQIGDQYADLFLAAKNLSDAILLSDILRVNTEITKAPLSASMIKRYDEHHQDLTLLKALVRQQLPEKYKEIFFDQSKNGYAGYIDGGASQEEFYKFIKPILEKMDGTEELLVKLNREDLLRKQRTFDNGSIPHQIHLGELHAILRRQEDFYPFLKDNREKIEKILTFRIPYYVGPLARGNSRFAWMTRKSEETITPWNFEEVVDKGASAQSFIERMTNFDKNLPNEKVLPKHSLLYEYFTVYNELTKVKYVTEGMRKPAFLSGEQKKAIVDLLFKTNRKVTVKQLKEDYFKKIECFDSVEISGVEDRFNASLGTYHDLLKIIKDKDFLDNEENEDILEDIVLTLTLFEDREMIEERLKTYAHLFDDKVMKQLKRRRYTGWGRLSRKLINGIRDKQSGKTILDFLKSDGFANRNFMQLIHDDSLTFKEDIQKAQVSGQGDSLHEHIANLAGSPAIKKGILQTVKVVDELVKVMGRHKPENIVIEMARENQTTQKGQKNSRERMKRIEEGIKELGSQILKEHPVENTQLQNEKLYLYYLQNGRDMYVDQELDINRLSDYDVDHIVPQSFLKDDSIDNKVLTRSDKARGKSDNVPSEEVVKKMKNYWRQLLNAKLITQRKFDNLTKAERGGLSELDKAGFIKRQLVETRQITKHVAQILDSRMNTKYDENDKLIREVKVITLKSKLVSDFRKDFQFYKVREINNYHHAHDAYLNAVVGTALIKKYPKLESEFVYGDYKVYDVRKMIAKSEQEIGKATAKYFFYSNIMNFFKTEITLANGEIRKRPLIETNGETGEIVWDKGRDFATVRKVLSMPQVNIVKKTEVQTGGFSKESILPKRNSDKLIARKKDWDPKKYGGFDSPTVAYSVLVVAKVEKGKSKKLKSVKELLGITIMERSSFEKNPIDFLEAKGYKEVKKDLIIKLPKYSLFELENGRKRMLASAGELQKGNELALPSKYVNFLYLASHYEKLKGSPEDNEQKQLFVEQHKHYLDEIIEQISEFSKRVILADANLDKVLSAYNKHRDKPIREQAENIIHLFTLTNLGAPAAFKYFDTTIDRKRYTSTKEVLDATLIHQSITGLYETRIDLSQLGGDGGPAPGSSGGSGGVLNLEEEYRLHEKPVPSSIDPSWLQLFPTVWAERAGMGLANQVPPVVVELRSGASPVAVRQYPMSKEAREGIRPHIQRFLDLGVLVPCQSPWNTPLLPVKKPGTNDYRPVQDLREINKRVQDIHPTVPNPYNLLSSLPPSHTWYSVLDLKDAFFCLKLHPNSQPLFAFEWRDPEKGNTGQLTWTRLPQGFKNSPTLFNEALHRDLAPFRALNPQVVLLQYVDDLLVAAPTYRDCKEGTQKLLQELSKLGYRVSAKKAQLCQKEVTYLGYLLKEGKRWLTPARKATVMKIPPPTTPRQVREFLGKAGFCRLFIPGFASLAAPLYPLTKPSIPFIWTEEHQKAFDRIKEALLSAPALALPDLTKPFTLYVDERAGVARGVLTQTLGPWRRPVAYLSKKLDPVASGWPTCLKAVAAVALLLKDADKLTLGQNVTVIASHSLESIVRQPPDRWMTNARMTHYQSLLLNERVSFAPPAVLNPATLLPVESEATPVHRCSEILAEETGTRRDLKDQPLPGVPAWYTDGSSFIAEGKRRAGAAIVDGKRTVWASSLPEGTSAQKAELVALTQALRLAEGKDINIYTDSRYAFATAHIHGAIYKQRGWLTSAGKDIKNKEEILALLEAIHLPKRVAIIHCPGHQKGNDPVATGNRRADEAAKQAALSTRVLAETTKPAGKRTADGSEFEKRTADGSEFESPKKKAKVE

SEQ ID NO: 7193 - protein, 2095 aa, synthetic construct
MPAAKRVKLDGGDKKYSIGLDIGTNSVGWAVITDEYKVPSKKFKVLGNTDRHSIKKNLIGALLFDSGETAEATRLKRTARRRYTRRKNRICYLQEIFSNEMAKVDDSFFHRLEESFLVEEDKKHERHPIFGNIVDEVAYHEKYPTIYHLRKKLVDSTDKADLRLIYLALAHMIKFRGHFLIEGDLNPDNSDVDKLFIQLVQTYNQLFEENPINASGVDAKAILSARLSKSRRLENLIAQLPGEKKNGLFGNLIALSLGLTPNFKSNFDLAEDAKLQLSKDTYDDDLDNLLAQIGDQYADLFLAAKNLSDAILLSDILRVNTEITKAPLSASMIKRYDEHHQDLTLLKALVRQQLPEKYKEIFFDQSKNGYAGYIDGGASQEEFYKFIKPILEKMDGTEELLVKLNREDLLRKQRTFDNGSIPHQIHLGELHAILRRQEDFYPFLKDNREKIEKILTFRIPYYVGPLARGNSRFAWMTRKSEETITPWNFEEVVDKGASAQSFIERMTNFDKNLPNEKVLPKHSLLYEYFTVYNELTKVKYVTEGMRKPAFLSGEQKKAIVDLLFKTNRKVTVKQLKEDYFKKIECFDSVEISGVEDRFNASLGTYHDLLKIIKDKDFLDNEENEDILEDIVLTLTLFEDREMIEERLKTYAHLFDDKVMKQLKRRRYTGWGRLSRKLINGIRDKQSGKTILDFLKSDGFANRNFMQLIHDDSLTFKEDIQKAQVSGQGDSLHEHIANLAGSPAIKKGILQTVKVVDELVKVMGRHKPENIVIEMARENQTTQKGQKNSRERMKRIEEGIKELGSQILKEHPVENTQLQNEKLYLYYLQNGRDMYVDQELDINRLSDYDVDHIVPQSFLKDDSIDNKVLTRSDKARGKSDNVPSEEVVKKMKNYWRQLLNAKLITQRKFDNLTKAERGGLSELDKAGFIKRQLVETRQITKHVAQILDSRMNTKYDENDKLIREVKVITLKSKLVSDFRKDFQFYKVREINNYHHAHDAYLNAVVGTALIKKYPKLESEFVYGDYKVYDVRKMIAKSEQEIGKATAKYFFYSNIMNFFKTEITLANGEIRKRPLIETNGETGEIVWDKGRDFATVRKVLSMPQVNIVKKTEVQTGGFSKESILPKRNSDKLIARKKDWDPKKYGGFDSPTVAYSVLVVAKVEKGKSKKLKSVKELLGITIMERSSFEKNPIDFLEAKGYKEVKKDLIIKLPKYSLFELENGRKRMLASAGELQKGNELALPSKYVNFLYLASHYEKLKGSPEDNEQKQLFVEQHKHYLDEIIEQISEFSKRVILADANLDKVLSAYNKHRDKPIREQAENIIHLFTLTNLGAPAAFKYFDTTIDRKRYTSTKEVLDATLIHQSITGLYETRIDLSQLGGDGGGGSEAAAKPAPGGTLQLEEEYRLFEPESTQKQEMDIWLKNFPQAWAETGGMGTAHCQAPVLIQLKATATPISIRQYPMPHEAYQGIKPHIRRMLDQGILKPCQSPWNTPLLPVKKPGTEDYRPVQDLREVNKRVEDIHPTVPNPYNLLSTLPPSHPWYTVLDLKDAFFCLRLHSESQLLFAFEWRDPEIGLSGQLTWTRLPQGFKNSPTLFNEALHSDLADFRVRYPALVLLQYVDDLLLAAATRTECLEGTKALLETLGNKGYRASAKKAQICLQEVTYLGYSLKDGQRWLTKARKEAILSIPVPKNSRQVREFLGTAGYCRLWIPGFAELAAPLYPLTRPGTLFQWGTEQQLAFEDIKKALLSSPALGLPDITKPFELFIDENSGFAKGVLVQKLGPWKRPVAYLSKKLDTVASGWPPCLRMVAAIAILVKDAGKLTLGQPLTILTSHPVEALVRQPPNKWLSNARMTHYQAMLLDAERVHFGPTVSLNPATLLPLPSGGNHHDCLQILAETHGTRPDLTDQPLPDADLTWYTDGSSFIRNGEREAGAAVTTESEVIWAAPLPPGTSAQRAELIALTQALKMAEGKKLTVYTDSRYAFATTHVHGEIYRRRGWLTSEGKEIKNKNEILALLEALFLPKRLSIIHCPGHQKGDSPQAKGNRLADDTAKKAATETHSSLTVLPAGKRTADGSEFEKRTADGSEFESPKKKAKVE

SEQ ID NO: 7194 - protein, 2095 aa, synthetic construct
MPAAKRVKLDGGDKKYSIGLDIGTNSVGWAVITDEYKVPSKKFKVLGNTDRHSIKKNLIGALLFDSGETAEATRLKRTARRRYTRRKNRICYLQEIFSNEMAKVDDSFFHRLEESFLVEEDKKHERHPIFGNIVDEVAYHEKYPTIYHLRKKLVDSTDKADLRLIYLALAHMIKFRGHFLIEGDLNPDNSDVDKLFIQLVQTYNQLFEENPINASGVDAKAILSARLSKSRRLENLIAQLPGEKKNGLFGNLIALSLGLTPNFKSNFDLAEDAKLQLSKDTYDDDLDNLLAQIGDQYADLFLAAKNLSDAILLSDILRVNTEITKAPLSASMIKRYDEHHQDLTLLKALVRQQLPEKYKEIFFDQSKNGYAGYIDGGASQEEFYKFIKPILEKMDGTEELLVKLNREDLLRKQRTFDNGSIPHQIHLGELHAILRRQEDFYPFLKDNREKIEKILTFRIPYYVGPLARGNSRFAWMTRKSEETITPWNFEEVVDKGASAQSFIERMTNFDKNLPNEKVLPKHSLLYEYFTVYNELTKVKYVTEGMRKPAFLSGEQKKAIVDLLFKTNRKVTVKQLKEDYFKKIECFDSVEISGVEDRFNASLGTYHDLLKIIKDKDFLDNEENEDILEDIVLTLTLFEDREMIEERLKTYAHLFDDKVMKQLKRRRYTGWGRLSRKLINGIRDKQSGKTILDFLKSDGFANRNFMQLIHDDSLTFKEDIQKAQVSGQGDSLHEHIANLAGSPAIKKGILQTVKVVDELVKVMGRHKPENIVIEMARENQTTQKGQKNSRERMKRIEEGIKELGSQILKEHPVENTQLQNEKLYLYYLQNGRDMYVDQELDINRLSDYDVDHIVPQSFLKDDSIDNKVLTRSDKARGKSDNVPSEEVVKKMKNYWRQLLNAKLITQRKFDNLTKAERGGLSELDKAGFIKRQLVETRQITKHVAQILDSRMNTKYDENDKLIREVKVITLKSKLVSDFRKDFQFYKVREINNYHHAHDAYLNAVVGTALIKKYPKLESEFVYGDYKVYDVRKMIAKSEQEIGKATAKYFFYSNIMNFFKTEITLANGEIRKRPLIETNGETGEIVWDKGRDFATVRKVLSMPQVNIVKKTEVQTGGFSKESILPKRNSDKLIARKKDWDPKKYGGFDSPTVAYSVLVVAKVEKGKSKKLKSVKELLGITIMERSSFEKNPIDFLEAKGYKEVKKDLIIKLPKYSLFELENGRKRMLASAGELQKGNELALPSKYVNFLYLASHYEKLKGSPEDNEQKQLFVEQHKHYLDEIIEQISEFSKRVILADANLDKVLSAYNKHRDKPIREQAENIIHLFTLTNLGAPAAFKYFDTTIDRKRYTSTKEVLDATLIHQSITGLYETRIDLSQLGGDGGGGSEAAAKPAPGGTLQLEEEYRLFEPESTQKQEMDIWLKNFPQAWAETGGMGTAHCQAPVLIQLKATATPISIRQYPMPHEAYQGIKPHIRRMLDQGILKPCQSPWNTPLLPVKKPGTEDYRPVQDLREVNKRVEDIHPTVPNPYNLLSTLPPSHPWYTVLDLKDAFFCLRLHSESQLLFAFEWRDPEIGLSGQLTWTRLPQGFKNSPTLFNEALHSDLADFRVRYPALVLLQYVDDLLLAAATRTECLEGTKALLETLGNKGYRASAKKAQICLQEVTYLGYSLKDGQRWLTKARKEAILSIPVPKNSRQVREFLGKAGYCRLFIPGFAELAAPLYPLTRPGTLFQWGTEQQLAFEDIKKALLSSPALGLPDITKPFELFIDENSGFAKGVLVQKLGPWKRPVAYLSKKLDTVASGWPPCLRMVAAIAILVKDAGKLTLGQPLTILTSHPVEALVRQPPNKWLSNARMTHYQAMLLDAERVHFGPTVSLNPATLLPLPSGGNHHDCLQILAETHGTRPDLTDQPLPDADLTWYTDGSSFIRNGEREAGAAVTTESEVIWAAPLPPGTSAQRAELIALTQALKMAEGKKLTVYTDSRYAFATTHVHGEIYRRRGWLTSEGKEIKNKNEILALLEALFLPKRLSIIHCPGHQKGDSPQAKGNRLADDTAKKAATETHSSLTVLPAGKRTADGSEFEKRTADGSEFESPKKKAKVE

SEQ ID NO: 7195 - protein, 2176 aa, synthetic construct
MPAAKRVKLDGGDKKYSIGLDIGTNSVGWAVITDEYKVPSKKFKVLGNTDRHSIKKNLIGALLFDSGETAEATRLKRTARRRYTRRKNRICYLQEIFSNEMAKVDDSFFHRLEESFLVEEDKKHERHPIFGNIVDEVAYHEKYPTIYHLRKKLVDSTDKADLRLIYLALAHMIKFRGHFLIEGDLNPDNSDVDKLFIQLVQTYNQLFEENPINASGVDAKAILSARLSKSRRLENLIAQLPGEKKNGLFGNLIALSLGLTPNFKSNFDLAEDAKLQLSKDTYDDDLDNLLAQIGDQYADLFLAAKNLSDAILLSDILRVNTEITKAPLSASMIKRYDEHHQDLTLLKALVRQQLPEKYKEIFFDQSKNGYAGYIDGGASQEEFYKFIKPILEKMDGTEELLVKLNREDLLRKQRTFDNGSIPHQIHLGELHAILRRQEDFYPFLKDNREKIEKILTFRIPYYVGPLARGNSRFAWMTRKSEETITPWNFEEVVDKGASAQSFIERMTNFDKNLPNEKVLPKHSLLYEYFTVYNELTKVKYVTEGMRKPAFLSGEQKKAIVDLLFKTNRKVTVKQLKEDYFKKIECFDSVEISGVEDRFNASLGTYHDLLKIIKDKDFLDNEENEDILEDIVLTLTLFEDREMIEERLKTYAHLFDDKVMKQLKRRRYTGWGRLSRKLINGIRDKQSGKTILDFLKSDGFANRNFMQLIHDDSLTFKEDIQKAQVSGQGDSLHEHIANLAGSPAIKKGILQTVKVVDELVKVMGRHKPENIVIEMARENQTTQKGQKNSRERMKRIEEGIKELGSQILKEHPVENTQLQNEKLYLYYLQNGRDMYVDQELDINRLSDYDVDHIVPQSFLKDDSIDNKVLTRSDKARGKSDNVPSEEVVKKMKNYWRQLLNAKLITQRKFDNLTKAERGGLSELDKAGFIKRQLVETRQITKHVAQILDSRMNTKYDENDKLIREVKVITLKSKLVSDFRKDFQFYKVREINNYHHAHDAYLNAVVGTALIKKYPKLESEFVYGDYKVYDVRKMIAKSEQEIGKATAKYFFYSNIMNFFKTEITLANGEIRKRPLIETNGETGEIVWDKGRDFATVRKVLSMPQVNIVKKTEVQTGGFSKESILPKRNSDKLIARKKDWDPKKYGGFDSPTVAYSVLVVAKVEKGKSKKLKSVKELLGITIMERSSFEKNPIDFLEAKGYKEVKKDLIIKLPKYSLFELENGRKRMLASAGELQKGNELALPSKYVNFLYLASHYEKLKGSPEDNEQKQLFVEQHKHYLDEIIEQISEFSKRVILADANLDKVLSAYNKHRDKPIREQAENIIHLFTLTNLGAPAAFKYFDTTIDRKRYTSTKEVLDATLIHQSITGLYETRIDLSQLGGDGGGGSEAAAKPAPGGMNPLQLLQPLPAEIKGTKLLAHWNSGATITCIPESFLEDEQPIKKTLIKTIHGEKQQNVYYVTFKVKGRKVEAEVIASPYEYILLSPTDVPWLTQQPLQLTILVPLQEYQEKILSKTALPEDQKQQLKTLFVKYDNLWQHWENQVGHRKIRPHNIATGDYPPRPQKQYPINPKAKPSIQIVIDDLLKQGVLTPQNSTMNTPVYPVPKPDGRWRMVLDYREVNKTIPLTAAQNQHSAGILATIVRQKYKTTLDLANGFWAHPITPESYWLTAFTWQGKQYCWTRLPQGFLNSPALFNADVVDLLKEIPNVQVYVDDIYLSHDDPKEHVQQLEKVFQILLQAGYVVSLKKSEIGQKTVEFLGFNITKEGRGLTDTFKTKLLNITPPKDLKQLQSILGKLNFARNFIPNFAELVQPLYNLIAPAKGKYIEWSEENTKQLNMVIEALNTASNLEERLPEQRLVIKVNTSPSAGYVRYYNETGKKPIMYLNYVFSKAELKFSMLEKLLTTMHKALIKAMDLAMGQEILVYSPIVSMTKIQKTPLPERKALPIRWITWMTYLEDPRIQFHYDKTLPELKHIPDVYTSSQSPVKHPSQYEGVFYTDGSAIKSPDPTKSNNAGMGIVHATYKPEYQVLNQWSIPLGNHTAQMAEIAAVEFACKKALKIPGPVLVITDSFYVAESANKELPYWKSNGFVNNKKKPLKHISKWKSIAECLSMKPDITIQHEKGISLQIPVFILKGNALADKLATQGSYVVNAGKRTADGSEFEKRTADGSEFESPKKKAKVE

SEQ ID NO: 7196 - protein, 2218 aa, synthetic construct
MPAAKRVKLDGGDKKYSIGLDIGTNSVGWAVITDEYKVPSKKFKVLGNTDRHSIKKNLIGALLFDSGETAEATRLKRTARRRYTRRKNRICYLQEIFSNEMAKVDDSFFHRLEESFLVEEDKKHERHPIFGNIVDEVAYHEKYPTIYHLRKKLVDSTDKADLRLIYLALAHMIKFRGHFLIEGDLNPDNSDVDKLFIQLVQTYNQLFEENPINASGVDAKAILSARLSKSRRLENLIAQLPGEKKNGLFGNLIALSLGLTPNFKSNFDLAEDAKLQLSKDTYDDDLDNLLAQIGDQYADLFLAAKNLSDAILLSDILRVNTEITKAPLSASMIKRYDEHHQDLTLLKALVRQQLPEKYKEIFFDQSKNGYAGYIDGGASQEEFYKFIKPILEKMDGTEELLVKLNREDLLRKQRTFDNGSIPHQIHLGELHAILRRQEDFYPFLKDNREKIEKILTFRIPYYVGPLARGNSRFAWMTRKSEETITPWNFEEVVDKGASAQSFIERMTNFDKNLPNEKVLPKHSLLYEYFTVYNELTKVKYVTEGMRKPAFLSGEQKKAIVDLLFKTNRKVTVKQLKEDYFKKIECFDSVEISGVEDRFNASLGTYHDLLKIIKDKDFLDNEENEDILEDIVLTLTLFEDREMIEERLKTYAHLFDDKVMKQLKRRRYTGWGRLSRKLINGIRDKQSGKTILDFLKSDGFANRNFMQLIHDDSLTFKEDIQKAQVSGQGDSLHEHIANLAGSPAIKKGILQTVKVVDELVKVMGRHKPENIVIEMARENQTTQKGQKNSRERMKRIEEGIKELGSQILKEHPVENTQLQNEKLYLYYLQNGRDMYVDQELDINRLSDYDVDHIVPQSFLKDDSIDNKVLTRSDKARGKSDNVPSEEVVKKMKNYWRQLLNAKLITQRKFDNLTKAERGGLSELDKAGFIKRQLVETRQITKHVAQILDSRMNTKYDENDKLIREVKVITLKSKLVSDFRKDFQFYKVREINNYHHAHDAYLNAVVGTALIKKYPKLESEFVYGDYKVYDVRKMIAKSEQEIGKATAKYFFYSNIMNFFKTEITLANGEIRKRPLIETNGETGEIVWDKGRDFATVRKVLSMPQVNIVKKTEVQTGGFSKESILPKRNSDKLIARKKDWDPKKYGGFDSPTVAYSVLVVAKVEKGKSKKLKSVKELLGITIMERSSFEKNPIDFLEAKGYKEVKKDLIIKLPKYSLFELENGRKRMLASAGELQKGNELALPSKYVNFLYLASHYEKLKGSPEDNEQKQLFVEQHKHYLDEIIEQISEFSKRVILADANLDKVLSAYNKHRDKPIREQAENIIHLFTLTNLGAPAAFKYFDTTIDRKRYTSTKEVLDATLIHQSITGLYETRIDLSQLGGDGGGGSEAAAKPAPGGTLGDQGSRGSDPLPEPRVTLTVEGIPTEFLVNTGAEHSVLTKPMGKMGSKRTVVAGATGSKVYPWTTKRLLKIGQKQVTHSFLVIPECPAPLLGRDLLTKLKAQIQFSTEGPQVTWEDRPAMCLVLNLEEEYRLHEKPVPPSIDPSWLQLFPMVWAEKAGMGLANQVPPVVVELKSDASPVAVRQYPMSKEAREGIRPHIQRFLDLGILVPCQSPWNTPLLPVKKPGTNDYRPVQDLREVNKRVQDIHPTVPNPYNLLSSLPPSHTWYSVLDLKDAFFCLKLHPNSQPLFAFEWRDPEKGNTGQLTWTRLPQGFKNSPTLFNEALHRDLASFRALNPQVVMLQYVDDLLVAAPTYRDCKEGTRRLLQELSKLGYRVSAKKAQLCREEVTYLGYLLKGGKRWLTPARKATVMKIPTPTTPRQVREFLGTAGFCRLWIPGFASLAAPLYPLTRPKVPFTWTEAHQEAFGRIKEALLSAPALALPDLTKPFALYVDEKEGVARGVLTQTLGPWRRPVAYLSKKLDPVASGWPTCLKAIAAVALLLKDADKLTLGQNVLVIAPHNLESIVRQPPDRWMTNARMTHYQSLLLNERVSFAPPAILNPATLLPVESDDTPIHICSEILAEETGTRPDLRDQPLPGVPAWYTDGSSFIMDGRRQAGAAIVDNKRTVWASNLPEGTSAQKAELIALTQALRLAEGKSINIYTDSRYAFATAHVHGAIYKQRGWLTSAGKDIKNKEEILALLEAIHLPKRVAIIHCPGHQRGTDPVATGNRKADEAAKQAAQSTRILTETTKNAGKRTADGSEFEKRTADGSEFESPKKKAKVE

SEQ ID NO: 7197 - protein, 2218 aa, synthetic construct
MPAAKRVKLDGGDKKYSIGLDIGTNSVGWAVITDEYKVPSKKFKVLGNTDRHSIKKNLIGALLFDSGETAEATRLKRTARRRYTRRKNRICYLQEIFSNEMAKVDDSFFHRLEESFLVEEDKKHERHPIFGNIVDEVAYHEKYPTIYHLRKKLVDSTDKADLRLIYLALAHMIKFRGHFLIEGDLNPDNSDVDKLFIQLVQTYNQLFEENPINASGVDAKAILSARLSKSRRLENLIAQLPGEKKNGLFGNLIALSLGLTPNFKSNFDLAEDAKLQLSKDTYDDDLDNLLAQIGDQYADLFLAAKNLSDAILLSDILRVNTEITKAPLSASMIKRYDEHHQDLTLLKALVRQQLPEKYKEIFFDQSKNGYAGYIDGGASQEEFYKFIKPILEKMDGTEELLVKLNREDLLRKQRTFDNGSIPHQIHLGELHAILRRQEDFYPFLKDNREKIEKILTFRIPYYVGPLARGNSRFAWMTRKSEETITPWNFEEVVDKGASAQSFIERMTNFDKNLPNEKVLPKHSLLYEYFTVYNELTKVKYVTEGMRKPAFLSGEQKKAIVDLLFKTNRKVTVKQLKEDYFKKIECFDSVEISGVEDRFNASLGTYHDLLKIIKDKDFLDNEENEDILEDIVLTLTLFEDREMIEERLKTYAHLFDDKVMKQLKRRRYTGWGRLSRKLINGIRDKQSGKTILDFLKSDGFANRNFMQLIHDDSLTFKEDIQKAQVSGQGDSLHEHIANLAGSPAIKKGILQTVKVVDELVKVMGRHKPENIVIEMARENQTTQKGQKNSRERMKRIEEGIKELGSQILKEHPVENTQLQNEKLYLYYLQNGRDMYVDQELDINRLSDYDVDHIVPQSFLKDDSIDNKVLTRSDKARGKSDNVPSEEVVKKMKNYWRQLLNAKLITQRKFDNLTKAERGGLSELDKAGFIKRQLVETRQITKHVAQILDSRMNTKYDENDKLIREVKVITLKSKLVSDFRKDFQFYKVREINNYHHAHDAYLNAVVGTALIKKYPKLESEFVYGDYKVYDVRKMIAKSEQEIGKATAKYFFYSNIMNFFKTEITLANGEIRKRPLIETNGETGEIVWDKGRDFATVRKVLSMPQVNIVKKTEVQTGGFSKESILPKRNSDKLIARKKDWDPKKYGGFDSPTVAYSVLVVAKVEKGKSKKLKSVKELLGITIMERSSFEKNPIDFLEAKGYKEVKKDLIIKLPKYSLFELENGRKRMLASAGELQKGNELALPSKYVNFLYLASHYEKLKGSPEDNEQKQLFVEQHKHYLDEIIEQISEFSKRVILADANLDKVLSAYNKHRDKPIREQAENIIHLFTLTNLGAPAAFKYFDTTIDRKRYTSTKEVLDATLIHQSITGLYETRIDLSQLGGDGGGGSEAAAKPAPGGTLGDQGSRGSDPLPEPRVTLTVEGIPTEFLVNTGAEHSVLTKPMGKMGSKRTVVAGATGSKVYPWTTKRLLKIGQKQVTHSFLVIPECPAPLLGRDLLTKLKAQIQFSTEGPQVTWEDRPAMCLVLNLEEEYRLHEKPVPPSIDPSWLQLFPMVWAEKAGMGLANQVPPVVVELKSDASPVAVRQYPMSKEAREGIRPHIQRFLDLGILVPCQSPWNTPLLPVKKPGTNDYRPVQDLREVNKRVQDIHPTVPNPYNLLSSLPPSHTWYSVLDLKDAFFCLKLHPNSQPLFAFEWRDPEKGNTGQLTWTRLPQGFKNSPTLFNEALHRDLASFRALNPQVVMLQYVDDLLVAAPTYRDCKEGTRRLLQELSKLGYRVSAKKAQLCREEVTYLGYLLKGGKRWLTPARKATVMKIPTPTTPRQVREFLGKAGFCRLFIPGFASLAAPLYPLTRPKVPFTWTEAHQEAFGRIKEALLSAPALALPDLTKPFALYVDEKEGVARGVLTQTLGPWRRPVAYLSKKLDPVASGWPTCLKAIAAVALLLKDADKLTLGQNVLVIAPHNLESIVRQPPDRWMTNARMTHYQSLLLNERVSFAPPAILNPATLLPVESDDTPIHICSEILAEETGTRPDLRDQPLPGVPAWYTDGSSFIMDGRRQAGAAIVDNKRTVWASNLPEGTSAQKAELIALTQALRLAEGKSINIYTDSRYAFATAHVHGAIYKQRGWLTSAGKDIKNKEEILALLEAIHLPKRVAIIHCPGHQRGTDPVATGNRKADEAAKQAAQSTRILTETTKNAGKRTADGSEFEKRTADGSEFESPKKKAKVE

SEQ ID NO: 7198 - protein, 2096 aa, synthetic construct
MPAAKRVKLDGGDKKYSIGLDIGTNSVGWAVITDEYKVPSKKFKVLGNTDRHSIKKNLIGALLFDSGETAEATRLKRTARRRYTRRKNRICYLQEIFSNEMAKVDDSFFHRLEESFLVEEDKKHERHPIFGNIVDEVAYHEKYPTIYHLRKKLVDSTDKADLRLIYLALAHMIKFRGHFLIEGDLNPDNSDVDKLFIQLVQTYNQLFEENPINASGVDAKAILSARLSKSRRLENLIAQLPGEKKNGLFGNLIALSLGLTPNFKSNFDLAEDAKLQLSKDTYDDDLDNLLAQIGDQYADLFLAAKNLSDAILLSDILRVNTEITKAPLSASMIKRYDEHHQDLTLLKALVRQQLPEKYKEIFFDQSKNGYAGYIDGGASQEEFYKFIKPILEKMDGTEELLVKLNREDLLRKQRTFDNGSIPHQIHLGELHAILRRQEDFYPFLKDNREKIEKILTFRIPYYVGPLARGNSRFAWMTRKSEETITPWNFEEVVDKGASAQSFIERMTNFDKNLPNEKVLPKHSLLYEYFTVYNELTKVKYVTEGMRKPAFLSGEQKKAIVDLLFKTNRKVTVKQLKEDYFKKIECFDSVEISGVEDRFNASLGTYHDLLKIIKDKDFLDNEENEDILEDIVLTLTLFEDREMIEERLKTYAHLFDDKVMKQLKRRRYTGWGRLSRKLINGIRDKQSGKTILDFLKSDGFANRNFMQLIHDDSLTFKEDIQKAQVSGQGDSLHEHIANLAGSPAIKKGILQTVKVVDELVKVMGRHKPENIVIEMARENQTTQKGQKNSRERMKRIEEGIKELGSQILKEHPVENTQLQNEKLYLYYLQNGRDMYVDQELDINRLSDYDVDHIVPQSFLKDDSIDNKVLTRSDKARGKSDNVPSEEVVKKMKNYWRQLLNAKLITQRKFDNLTKAERGGLSELDKAGFIKRQLVETRQITKHVAQILDSRMNTKYDENDKLIREVKVITLKSKLVSDFRKDFQFYKVREINNYHHAHDAYLNAVVGTALIKKYPKLESEFVYGDYKVYDVRKMIAKSEQEIGKATAKYFFYSNIMNFFKTEITLANGEIRKRPLIETNGETGEIVWDKGRDFATVRKVLSMPQVNIVKKTEVQTGGFSKESILPKRNSDKLIARKKDWDPKKYGGFDSPTVAYSVLVVAKVEKGKSKKLKSVKELLGITIMERSSFEKNPIDFLEAKGYKEVKKDLIIKLPKYSLFELENGRKRMLASAGELQKGNELALPSKYVNFLYLASHYEKLKGSPEDNEQKQLFVEQHKHYLDEIIEQISEFSKRVILADANLDKVLSAYNKHRDKPIREQAENIIHLFTLTNLGAPAAFKYFDTTIDRKRYTSTKEVLDATLIHQSITGLYETRIDLSQLGGDGGGGSEAAAKPAPGGTLNLEDEYRLYETSAEPEVSPGSTWLSDFPQAWAETGGMGLAVRQAPLIIPLKATSTPVSIKQYPMSQEAKLGIKPHIQRLLDQGILVPCQSPWNTPLLPVKKPGTNDYRPVQDLREVNKRVEDIHPTVPNPYNLLSGLPPSHRWYTVLDLKDAFFCLRLHPTSQPLFAFEWRDPGMGISGQLTWTRLPQGFKNSPTLFNEALHRDLADFRIQHPDLILLQYVDDILLAATSELDCQQGTRALLLTLGNLGYRASAKKAQLCQKQVKYLGYLLKEGQRWLTEARKETVMGQPTPKTPRQLREFLGKAGFCRLFIPGFAEMAAPLYPLTKPGTLFNWGPDQQKAYQEIKQALLTAPALGLPDLTKPFELFVDEKQGYAKGVLTQKLGPWRRPVAYLSKKLDPVAAGWPPCLRMVAAIAVLRKDAGKLTMGQPLVILAPHAVEALVKQPPDRWLSNARMTHYQAMLLDTDRVQFGPVVALNPATLLPLPEEGAPHDCLEILAETHGTRPDLTDQPIPDADHTWYTDGSSFLQEGQRKAGAAVTTETEVIWARALPAGTSAQRAELIALTQALKMAEGKRLNVYTDSRYAFATAHIHGEIYRRRGWLTSEGREIKNKSEILALLKALFLPKRLSIIHCLGHQKGDSAEARGNRLADQAAREAAIKTPPDTSTLLAGKRTADGSEFEKRTADGSEFESPKKKAKVE

SEQ ID NO: 7199 - protein, 2096 aa, synthetic construct
MPAAKRVKLDGGDKKYSIGLDIGTNSVGWAVITDEYKVPSKKFKVLGNTDRHSIKKNLIGALLFDSGETAEATRLKRTARRRYTRRKNRICYLQEIFSNEMAKVDDSFFHRLEESFLVEEDKKHERHPIFGNIVDEVAYHEKYPTIYHLRKKLVDSTDKADLRLIYLALAHMIKFRGHFLIEGDLNPDNSDVDKLFIQLVQTYNQLFEENPINASGVDAKAILSARLSKSRRLENLIAQLPGEKKNGLFGNLIALSLGLTPNFKSNFDLAEDAKLQLSKDTYDDDLDNLLAQIGDQYADLFLAAKNLSDAILLSDILRVNTEITKAPLSASMIKRYDEHHQDLTLLKALVRQQLPEKYKEIFFDQSKNGYAGYIDGGASQEEFYKFIKPILEKMDGTEELLVKLNREDLLRKQRTFDNGSIPHQIHLGELHAILRRQEDFYPFLKDNREKIEKILTFRIPYYVGPLARGNSRFAWMTRKSEETITPWNFEEVVDKGASAQSFIERMTNFDKNLPNEKVLPKHSLLYEYFTVYNELTKVKYVTEGMRKPAFLSGEQKKAIVDLLFKTNRKVTVKQLKEDYFKKIECFDSVEISGVEDRFNASLGTYHDLLKIIKDKDFLDNEENEDILEDIVLTLTLFEDREMIEERLKTYAHLFDDKVMKQLKRRRYTGWGRLSRKLINGIRDKQSGKTILDFLKSDGFANRNFMQLIHDDSLTFKEDIQKAQVSGQGDSLHEHIANLAGSPAIKKGILQTVKVVDELVKVMGRHKPENIVIEMARENQTTQKGQKNSRERMKRIEEGIKELGSQILKEHPVENTQLQNEKLYLYYLQNGRDMYVDQELDINRLSDYDVDHIVPQSFLKDDSIDNKVLTRSDKARGKSDNVPSEEVVKKMKNYWRQLLNAKLITQRKFDNLTKAERGGLSELDKAGFIKRQLVETRQITKHVAQILDSRMNTKYDENDKLIREVKVITLKSKLVSDFRKDFQFYKVREINNYHHAHDAYLNAVVGTALIKKYPKLESEFVYGDYKVYDVRKMIAKSEQEIGKATAKYFFYSNIMNFFKTEITLANGEIRKRPLIETNGETGEIVWDKGRDFATVRKVLSMPQVNIVKKTEVQTGGFSKESILPKRNSDKLIARKKDWDPKKYGGFDSPTVAYSVLVVAKVEKGKSKKLKSVKELLGITIMERSSFEKNPIDFLEAKGYKEVKKDLIIKLPKYSLFELENGRKRMLASAGELQKGNELALPSKYVNFLYLASHYEKLKGSPEDNEQKQLFVEQHKHYLDEIIEQISEFSKRVILADANLDKVLSAYNKHRDKPIREQAENIIHLFTLTNLGAPAAFKYFDTTIDRKRYTSTKEVLDATLIHQSITGLYETRIDLSQLGGDGGGGSEAAAKPAPGGTLNIEDEYRLHETSKGPDVPLGSTWLSDFPQAWAETGGMGLAFRQAPLIISLKATSTPVSIKQYPMSQEARLGIKPHIQRLLDQGILVPCQSPWNTPLLPVKKPGTNDYRPVQDLREVNKRVEDIHPTVPNPYNLLSGLPPSHQWYTVLDLKDAFFCLRLHPTSQSLFAFEWKDPEMGISGQLTWTRLPQGFKNSPTLFNEALHRDLADFRIQHPDLILLQYVDDLLLAATSELDCQQGTRALLQTLGDLGYRASAKKAQICQKQVKYLGYLLKEGQRWLTEARKETVMGQPTPKTPRQLREFLGKAGLCRLFIPGFAEMAAPLYPLTKPGTLFKWGPDQQKAYQEIKQALLTAPALGLPDLTKPFELFVDEKQGYAKGVLTQKLGPWRRPVAYLSKKLDPVAAGWPPCLRMVAAIAVLTKDVGKLTMGQPLVILAPHAVEALVKQPPDRWLSNARMTHYQALLLDTDRVQFGPIVALNPATLLPLPEEGLQHDCLDILAEAHGTRPDLTDQPLPDADHTWYTDGSSFLQEGQRRAGAAVTTETEVIWAKALPAGTSAQRAELIALTQALKMAAGKKLNVYTDSRYAFATAHIHGEIYRRRGWLTSEGKEIKNKDEILALLKALFLPKRLSIIHCPGHQKGNHAEARGNRMADQAAREVATRETPETSTLLAGKRTADGSEFEKRTADGSEFESPKKKAKVE

SEQ ID NO: 7200 - protein, 2096 aa, synthetic construct
MPAAKRVKLDGGDKKYSIGLDIGTNSVGWAVITDEYKVPSKKFKVLGNTDRHSIKKNLIGALLFDSGETAEATRLKRTARRRYTRRKNRICYLQEIFSNEMAKVDDSFFHRLEESFLVEEDKKHERHPIFGNIVDEVAYHEKYPTIYHLRKKLVDSTDKADLRLIYLALAHMIKFRGHFLIEGDLNPDNSDVDKLFIQLVQTYNQLFEENPINASGVDAKAILSARLSKSRRLENLIAQLPGEKKNGLFGNLIALSLGLTPNFKSNFDLAEDAKLQLSKDTYDDDLDNLLAQIGDQYADLFLAAKNLSDAILLSDILRVNTEITKAPLSASMIKRYDEHHQDLTLLKALVRQQLPEKYKEIFFDQSKNGYAGYIDGGASQEEFYKFIKPILEKMDGTEELLVKLNREDLLRKQRTFDNGSIPHQIHLGELHAILRRQEDFYPFLKDNREKIEKILTFRIPYYVGPLARGNSRFAWMTRKSEETITPWNFEEVVDKGASAQSFIERMTNFDKNLPNEKVLPKHSLLYEYFTVYNELTKVKYVTEGMRKPAFLSGEQKKAIVDLLFKTNRKVTVKQLKEDYFKKIECFDSVEISGVEDRFNASLGTYHDLLKIIKDKDFLDNEENEDILEDIVLTLTLFEDREMIEERLKTYAHLFDDKVMKQLKRRRYTGWGRLSRKLINGIRDKQSGKTILDFLKSDGFANRNFMQLIHDDSLTFKEDIQKAQVSGQGDSLHEHIANLAGSPAIKKGILQTVKVVDELVKVMGRHKPENIVIEMARENQTTQKGQKNSRERMKRIEEGIKELGSQILKEHPVENTQLQNEKLYLYYLQNGRDMYVDQELDINRLSDYDVDHIVPQSFLKDDSIDNKVLTRSDKARGKSDNVPSEEVVKKMKNYWRQLLNAKLITQRKFDNLTKAERGGLSELDKAGFIKRQLVETRQITKHVAQILDSRMNTKYDENDKLIREVKVITLKSKLVSDFRKDFQFYKVREINNYHHAHDAYLNAVVGTALIKKYPKLESEFVYGDYKVYDVRKMIAKSEQEIGKATAKYFFYSNIMNFFKTEITLANGEIRKRPLIETNGETGEIVWDKGRDFATVRKVLSMPQVNIVKKTEVQTGGFSKESILPKRNSDKLIARKKDWDPKKYGGFDSPTVAYSVLVVAKVEKGKSKKLKSVKELLGITIMERSSFEKNPIDFLEAKGYKEVKKDLIIKLPKYSLFELENGRKRMLASAGELQKGNELALPSKYVNFLYLASHYEKLKGSPEDNEQKQLFVEQHKHYLDEIIEQISEFSKRVILADANLDKVLSAYNKHRDKPIREQAENIIHLFTLTNLGAPAAFKYFDTTIDRKRYTSTKEVLDATLIHQSITGLYETRIDLSQLGGDGGGGSEAAAKPAPGGTLNIEDEHRLHETSKEPDVSLGSTWLSDFPQAWAETGGMGLAVRQAPLIIPLKATSTPVSIKQYPMSQEARLGIKPHIQRLLDQGILVPCQSPWNTPLLPVKKPGTNDYRPVQDLREVNKRVEDIHPTVPNPYNLLSGLPPSHQWYTVLDLKDAFFCLRLHPTSQPLFAFEWRDPEMGISGQLTWTRLPQGFKNSPTLFDEALHRDLADFRIQHPDLILLQYVDDLLLAATSELDCQQGTRALLQTLGNLGYRASAKKAQICQKQVKYLGYLLKEGQRWLTEARKETVMGQPTPKTPRQLREFLGTAGFCRLWIPGFAEMAAPLYPLTKTGTLFNWGPDQQKAYQEIKQALLTAPALGLPDLTKPFELFVDEKQGYAKGVLTQKLGPWRRPVAYLSKKLDPVAAGWPPCLRMVAAIAVLTKDAGKLTMGQPLVILAPHAVEALVKQPPDRWLSNARMTHYQALLLDTDRVQFGPVVALNPATLLPLPEEGLQHNCLDILAEAHGTRPDLTDQPLPDADHTWYTDGSSLLQEGQRKAGAAVTTETEVIWAKALPAGTSAQRAELIALTQALKMAEGKKLNVYTDSRYAFATAHIHGEIYRRRGLLTSEGKEIKNKDEILALLKALFLPKRLSIIHCPGHQKGHSAEARGNRMADQAARKAAITETPDTSTLLAGKRTADGSEFEKRTADGSEFESPKKKAKVE

SEQ ID NO: 7201 - protein, 2090 aa, synthetic construct
MPAAKRVKLDGGDKKYSIGLDIGTNSVGWAVITDEYKVPSKKFKVLGNTDRHSIKKNLIGALLFDSGETAEATRLKRTARRRYTRRKNRICYLQEIFSNEMAKVDDSFFHRLEESFLVEEDKKHERHPIFGNIVDEVAYHEKYPTIYHLRKKLVDSTDKADLRLIYLALAHMIKFRGHFLIEGDLNPDNSDVDKLFIQLVQTYNQLFEENPINASGVDAKAILSARLSKSRRLENLIAQLPGEKKNGLFGNLIALSLGLTPNFKSNFDLAEDAKLQLSKDTYDDDLDNLLAQIGDQYADLFLAAKNLSDAILLSDILRVNTEITKAPLSASMIKRYDEHHQDLTLLKALVRQQLPEKYKEIFFDQSKNGYAGYIDGGASQEEFYKFIKPILEKMDGTEELLVKLNREDLLRKQRTFDNGSIPHQIHLGELHAILRRQEDFYPFLKDNREKIEKILTFRIPYYVGPLARGNSRFAWMTRKSEETITPWNFEEVVDKGASAQSFIERMTNFDKNLPNEKVLPKHSLLYEYFTVYNELTKVKYVTEGMRKPAFLSGEQKKAIVDLLFKTNRKVTVKQLKEDYFKKIECFDSVEISGVEDRFNASLGTYHDLLKIIKDKDFLDNEENEDILEDIVLTLTLFEDREMIEERLKTYAHLFDDKVMKQLKRRRYTGWGRLSRKLINGIRDKQSGKTILDFLKSDGFANRNFMQLIHDDSLTFKEDIQKAQVSGQGDSLHEHIANLAGSPAIKKGILQTVKVVDELVKVMGRHKPENIVIEMARENQTTQKGQKNSRERMKRIEEGIKELGSQILKEHPVENTQLQNEKLYLYYLQNGRDMYVDQELDINRLSDYDVDHIVPQSFLKDDSIDNKVLTRSDKARGKSDNVPSEEVVKKMKNYWRQLLNAKLITQRKFDNLTKAERGGLSELDKAGFIKRQLVETRQITKHVAQILDSRMNTKYDENDKLIREVKVITLKSKLVSDFRKDFQFYKVREINNYHHAHDAYLNAVVGTALIKKYPKLESEFVYGDYKVYDVRKMIAKSEQEIGKATAKYFFYSNIMNFFKTEITLANGEIRKRPLIETNGETGEIVWDKGRDFATVRKVLSMPQVNIVKKTEVQTGGFSKESILPKRNSDKLIARKKDWDPKKYGGFDSPTVAYSVLVVAKVEKGKSKKLKSVKELLGITIMERSSFEKNPIDFLEAKGYKEVKKDLIIKLPKYSLFELENGRKRMLASAGELQKGNELALPSKYVNFLYLASHYEKLKGSPEDNEQKQLFVEQHKHYLDEIIEQISEFSKRVILADANLDKVLSAYNKHRDKPIREQAENIIHLFTLTNLGAPAAFKYFDTTIDRKRYTSTKEVLDATLIHQSITGLYETRIDLSQLGGDGGGGSEAAAKPAPGGTLQLDDEYRLYSPLVKPDQNIQFWLEQFPQAWAETAGMGLAKQVPPQVIQLKASATPVSVRQYPLSKEAQEGIRPHVQRLIQQGILVPVQSPWNTPLLPVRKPGTNDYRPVQDLREVNKRVQDIHPTVPNPYNLLCALPPQRSWYTVLDLKDAFFCLRLHPTSQPLFAFEWRDPGTGRTGQLTWTRLPQGFKNSPTIFDEALHRDLANFRIQHPQVTLLQYVDDLLLAGATKQDCLEGTKALLLELSDLGYRASAKKAQICRREVTYLGYSLRDGQRWLTEARKKTVVQIPAPTTAKQVREFLGTAGFCRLWIPGFATLAAPLYPLTKEKGEFSWAPEHQKAFDAIKKALLSAPALALPDVTKPFTLYVDERKGVARGVLTQTLGPWRRPVAYLSKKLDPVASGWPVCLKAIAAVAILVKDADKLTLGQNITVIAPHALENIVRQPPDRWMTNARMTHYQSLLLTERVTFAPPAALNPATLLPEETDEPVTHDCHQLLIEETGVRKDLTDIPLTGEVLTWFTDGSSYVVEGKRMAGAAVVDGTRTIWASSLPEGTSAQKAELMALTQALRLAEGKSINIYTDSRYAFATAHVHGAIYKQRGLLTSAGREIKNKEEILSLLEALHLPKRLAIIHCPGHQKAKDPISRGNQMADRVAKQAAQGVNLLAGKRTADGSEFEKRTADGSEFESPKKKAKVE

SEQ ID NO: 7202 - protein, 2096 aa, synthetic construct
MPAAKRVKLDGGDKKYSIGLDIGTNSVGWAVITDEYKVPSKKFKVLGNTDRHSIKKNLIGALLFDSGETAEATRLKRTARRRYTRRKNRICYLQEIFSNEMAKVDDSFFHRLEESFLVEEDKKHERHPIFGNIVDEVAYHEKYPTIYHLRKKLVDSTDKADLRLIYLALAHMIKFRGHFLIEGDLNPDNSDVDKLFIQLVQTYNQLFEENPINASGVDAKAILSARLSKSRRLENLIAQLPGEKKNGLFGNLIALSLGLTPNFKSNFDLAEDAKLQLSKDTYDDDLDNLLAQIGDQYADLFLAAKNLSDAILLSDILRVNTEITKAPLSASMIKRYDEHHQDLTLLKALVRQQLPEKYKEIFFDQSKNGYAGYIDGGASQEEFYKFIKPILEKMDGTEELLVKLNREDLLRKQRTFDNGSIPHQIHLGELHAILRRQEDFYPFLKDNREKIEKILTFRIPYYVGPLARGNSRFAWMTRKSEETITPWNFEEVVDKGASAQSFIERMTNFDKNLPNEKVLPKHSLLYEYFTVYNELTKVKYVTEGMRKPAFLSGEQKKAIVDLLFKTNRKVTVKQLKEDYFKKIECFDSVEISGVEDRFNASLGTYHDLLKIIKDKDFLDNEENEDILEDIVLTLTLFEDREMIEERLKTYAHLFDDKVMKQLKRRRYTGWGRLSRKLINGIRDKQSGKTILDFLKSDGFANRNFMQLIHDDSLTFKEDIQKAQVSGQGDSLHEHIANLAGSPAIKKGILQTVKVVDELVKVMGRHKPENIVIEMARENQTTQKGQKNSRERMKRIEEGIKELGSQILKEHPVENTQLQNEKLYLYYLQNGRDMYVDQELDINRLSDYDVDHIVPQSFLKDDSIDNKVLTRSDKARGKSDNVPSEEVVKKMKNYWRQLLNAKLITQRKFDNLTKAERGGLSELDKAGFIKRQLVETRQITKHVAQILDSRMNTKYDENDKLIREVKVITLKSKLVSDFRKDFQFYKVREINNYHHAHDAYLNAVVGTALIKKYPKLESEFVYGDYKVYDVRKMIAKSEQEIGKATAKYFFYSNIMNFFKTEITLANGEIRKRPLIETNGETGEIVWDKGRDFATVRKVLSMPQVNIVKKTEVQTGGFSKESILPKRNSDKLIARKKDWDPKKYGGFDSPTVAYSVLVVAKVEKGKSKKLKSVKELLGITIMERSSFEKNPIDFLEAKGYKEVKKDLIIKLPKYSLFELENGRKRMLASAGELQKGNELALPSKYVNFLYLASHYEKLKGSPEDNEQKQLFVEQHKHYLDEIIEQISEFSKRVILADANLDKVLSAYNKHRDKPIREQAENIIHLFTLTNLGAPAAFKYFDTTIDRKRYTSTKEVLDATLIHQSITGLYETRIDLSQLGGDGGGGSEAAAKPAPGGTLNIEDEYRLHETSKEPDVPLGSTWLSDFPQAWAETGGMGLAVRQAPLIIPLKATSTPVSIKQYPMSQEARLGIKPHIQRLLDQGILVPCQSPWNTPLLPVKKPGTNDYRPVQDLREVNKRVEDIHPTVPNPYNLLSGLPPSHQWYTVLDLKDAFFCLRLHPTSQPLFAFEWRDPEMGISGQLTWTRLPQGFKNSPTLFDEALHRDLADFRIQHPDLILLQYVDDLLLAATSEQDCQRGTRALLQTLGNLGYRASAKKAQICQKQVKYLGYLLKEGQRWLTEARKETVMGQPTPKTPRQLREFLGTAGFCRLWIPGFAEMAAPLYPLTKTGTLFNWGPDQQKAYQEIKQALLTAPALGLPDLTKPFELFVDEKQGYAKGVLTQKLGPWRRPVAYLSKKLDPVAAGWPPCLRMVAAIAVLTKDAGKLTMGQPLVILAPHAVEALVKQPPDRWLSNARMTHYQAMLLDTDRVQFGPVVALNPATLLPLPEKEAPHDCLEILAETHGTRPDLTDQPIPDADYTWYTDGSSFLQEGQRRAGAAVTTETEVIWARALPAGTSAQRAELIALTQALKMAEGKKLNVYTDSRYAFATAHVHGEIYRRRGLLTSEGREIKNKNEILALLKALFLPKRLSIIHCPGHQKGNSAEARGNRMADQAAREAAMKAVLETSTLLAGKRTADGSEFEKRTADGSEFESPKKKAKVE

SEQ ID NO: 7203 - protein, 2096 aa, synthetic construct
MPAAKRVKLDGGDKKYSIGLDIGTNSVGWAVITDEYKVPSKKFKVLGNTDRHSIKKNLIGALLFDSGETAEATRLKRTARRRYTRRKNRICYLQEIFSNEMAKVDDSFFHRLEESFLVEEDKKHERHPIFGNIVDEVAYHEKYPTIYHLRKKLVDSTDKADLRLIYLALAHMIKFRGHFLIEGDLNPDNSDVDKLFIQLVQTYNQLFEENPINASGVDAKAILSARLSKSRRLENLIAQLPGEKKNGLFGNLIALSLGLTPNFKSNFDLAEDAKLQLSKDTYDDDLDNLLAQIGDQYADLFLAAKNLSDAILLSDILRVNTEITKAPLSASMIKRYDEHHQDLTLLKALVRQQLPEKYKEIFFDQSKNGYAGYIDGGASQEEFYKFIKPILEKMDGTEELLVKLNREDLLRKQRTFDNGSIPHQIHLGELHAILRRQEDFYPFLKDNREKIEKILTFRIPYYVGPLARGNSRFAWMTRKSEETITPWNFEEVVDKGASAQSFIERMTNFDKNLPNEKVLPKHSLLYEYFTVYNELTKVKYVTEGMRKPAFLSGEQKKAIVDLLFKTNRKVTVKQLKEDYFKKIECFDSVEISGVEDRFNASLGTYHDLLKIIKDKDFLDNEENEDILEDIVLTLTLFEDREMIEERLKTYAHLFDDKVMKQLKRRRYTGWGRLSRKLINGIRDKQSGKTILDFLKSDGFANRNFMQLIHDDSLTFKEDIQKAQVSGQGDSLHEHIANLAGSPAIKKGILQTVKVVDELVKVMGRHKPENIVIEMARENQTTQKGQKNSRERMKRIEEGIKELGSQILKEHPVENTQLQNEKLYLYYLQNGRDMYVDQELDINRLSDYDVDHIVPQSFLKDDSIDNKVLTRSDKARGKSDNVPSEEVVKKMKNYWRQLLNAKLITQRKFDNLTKAERGGLSELDKAGFIKRQLVETRQITKHVAQILDSRMNTKYDENDKLIREVKVITLKSKLVSDFRKDFQFYKVREINNYHHAHDAYLNAVVGTALIKKYPKLESEFVYGDYKVYDVRKMIAKSEQEIGKATAKYFFYSNIMNFFKTEITLANGEIRKRPLIETNGETGEIVWDKGRDFATVRKVLSMPQVNIVKKTEVQTGGFSKESILPKRNSDKLIARKKDWDPKKYGGFDSPTVAYSVLVVAKVEKGKSKKLKSVKELLGITIMERSSFEKNPIDFLEAKGYKEVKKDLIIKLPKYSLFELENGRKRMLASAGELQKGNELALPSKYVNFLYLASHYEKLKGSPEDNEQKQLFVEQHKHYLDEIIEQISEFSKRVILADANLDKVLSAYNKHRDKPIREQAENIIHLFTLTNLGAPAAFKYFDTTIDRKRYTSTKEVLDATLIHQSITGLYETRIDLSQLGGDGGGGSEAAAKPAPGGTLNIEDEYRLHETSKEPDVPLGSTWLSDFPQAWAETGGMGLAVRQAPLIIPLKATSTPVSIKQYPMSQEARLGIKPHIQRLLDQGILVPCQSPWNTPLLPVKKPGTNDYRPVQDLREVNKRVEDIHPTVPNPYNLLSGLPPSHQWYTVLDLKDAFFCLRLHPTSQPLFAFEWRDPEMGISGQLTWTRLPQGFKNSPTLFNEALHRDLADFRIQHPDLILLQYVDDLLLAATSEQDCQRGTRALLQTLGNLGYRASAKKAQICQKQVKYLGYLLKEGQRWLTEARKETVMGQPTPKTPRQLREFLGTAGFCRLWIPGFAEMAAPLYPLTKPGTLFNWGPDQQKAYQEIKQALLTAPALGLPDLTKPFELFVDEKQGYAKGVLTQKLGPWRRPVAYLSKKLDPVAAGWPPCLRMVAAIAVLTKDAGKLTMGQPLVILAPHAVEALVKQPPDRWLSNARMTHYQAMLLDTDRVQFGPVVALNPATLLPLPEKEAPHDCLEILAETHGTRPDLTDQPIPDADYTWYTDGSSFLQEGQRRAGAAVTTETEVIWARALPAGTSAQRAELIALTQALKMAEGKKLNVYTDSRYAFATAHVHGEIYRRRGWLTSEGREIKNKNEILALLKALFLPKRLSIIHCPGHQKGNSAEARGNRMADQAAREAAMKAVLETSTLLAGKRTADGSEFEKRTADGSEFESPKKKAKVE

SEQ ID NO: 7204 - protein, 2098 aa, synthetic construct
MPAAKRVKLDGGDKKYSIGLDIGTNSVGWAVITDEYKVPSKKFKVLGNTDRHSIKKNLIGALLFDSGETAEATRLKRTARRRYTRRKNRICYLQEIFSNEMAKVDDSFFHRLEESFLVEEDKKHERHPIFGNIVDEVAYHEKYPTIYHLRKKLVDSTDKADLRLIYLALAHMIKFRGHFLIEGDLNPDNSDVDKLFIQLVQTYNQLFEENPINASGVDAKAILSARLSKSRRLENLIAQLPGEKKNGLFGNLIALSLGLTPNFKSNFDLAEDAKLQLSKDTYDDDLDNLLAQIGDQYADLFLAAKNLSDAILLSDILRVNTEITKAPLSASMIKRYDEHHQDLTLLKALVRQQLPEKYKEIFFDQSKNGYAGYIDGGASQEEFYKFIKPILEKMDGTEELLVKLNREDLLRKQRTFDNGSIPHQIHLGELHAILRRQEDFYPFLKDNREKIEKILTFRIPYYVGPLARGNSRFAWMTRKSEETITPWNFEEVVDKGASAQSFIERMTNFDKNLPNEKVLPKHSLLYEYFTVYNELTKVKYVTEGMRKPAFLSGEQKKAIVDLLFKTNRKVTVKQLKEDYFKKIECFDSVEISGVEDRFNASLGTYHDLLKIIKDKDFLDNEENEDILEDIVLTLTLFEDREMIEERLKTYAHLFDDKVMKQLKRRRYTGWGRLSRKLINGIRDKQSGKTILDFLKSDGFANRNFMQLIHDDSLTFKEDIQKAQVSGQGDSLHEHIANLAGSPAIKKGILQTVKVVDELVKVMGRHKPENIVIEMARENQTTQKGQKNSRERMKRIEEGIKELGSQILKEHPVENTQLQNEKLYLYYLQNGRDMYVDQELDINRLSDYDVDHIVPQSFLKDDSIDNKVLTRSDKARGKSDNVPSEEVVKKMKNYWRQLLNAKLITQRKFDNLTKAERGGLSELDKAGFIKRQLVETRQITKHVAQILDSRMNTKYDENDKLIREVKVITLKSKLVSDFRKDFQFYKVREINNYHHAHDAYLNAVVGTALIKKYPKLESEFVYGDYKVYDVRKMIAKSEQEIGKATAKYFFYSNIMNFFKTEITLANGEIRKRPLIETNGETGEIVWDKGRDFATVRKVLSMPQVNIVKKTEVQTGGFSKESILPKRNSDKLIARKKDWDPKKYGGFDSPTVAYSVLVVAKVEKGKSKKLKSVKELLGITIMERSSFEKNPIDFLEAKGYKEVKKDLIIKLPKYSLFELENGRKRMLASAGELQKGNELALPSKYVNFLYLASHYEKLKGSPEDNEQKQLFVEQHKHYLDEIIEQISEFSKRVILADANLDKVLSAYNKHRDKPIREQAENIIHLFTLTNLGAPAAFKYFDTTIDRKRYTSTKEVLDATLIHQSITGLYETRIDLSQLGGDGGGGSPAPEAAAKGGTAPLEEEYRLFLEAPIQNVTLLEQWKREIPKVWAEINPPGLASTQAPIHVQLLSTALPVRVRQYPITLEAKRSLRETIRKFRAAGILRPVHSPWNTPLLPVRKSGTSEYRMVQDLREVNKRVETIHPTVPNPYTLLSLLPPDRIWYSVLDLKDAFFCIPLAPESQLIFAFEWADAEEGESGQLTWTRLPQGFKNSPTLFNEALNRDLQGFRLDHPSVSLLQYVDDLLIAADTQAACLSATRDLLMTLAELGYRVSGKKAQLCQEEVTYLGFKIHKGSRSLSNSRTQAILQIPVPKTKRQVREFLGKIGYCRLFIPGFAELAQPLYAATRPGNDPLVWGEKEEEAFQSLKLALTQPPALALPSLDKPFQLFVEETSGAAKGVLTQALGPWKRPVAYLSKRLDPVAAGWPRCLRAIAAAALLTREASKLTFGQDIEITSSHNLESLLRSPPDKWLTNARITQYQVLLLDPPRVRFKQTAALNPATLLPETDDTLPIHHCLDTLDSLTSTRPDLTDQPLAQAEATLFTDGSSYIRDGKRYAGAAVVTLDSVIWAEPLPIGTSAQKAELIALTKALEWSKDKSVNIYTDSRYAFATLHVHGMIYRERGWLTAGGKAIKNAPEILALLTAVWLPKRVAVMHCKGHQKDDAPTSTGNRRADEVAREVAIRPLSTQATISAGKRTADGSEFEKRTADGSEFESPKKKAKVE

SEQ ID NO: 7205 - protein, 2218 aa, synthetic construct
MPAAKRVKLDGGDKKYSIGLDIGTNSVGWAVITDEYKVPSKKFKVLGNTDRHSIKKNLIGALLFDSGETAEATRLKRTARRRYTRRKNRICYLQEIFSNEMAKVDDSFFHRLEESFLVEEDKKHERHPIFGNIVDEVAYHEKYPTIYHLRKKLVDSTDKADLRLIYLALAHMIKFRGHFLIEGDLNPDNSDVDKLFIQLVQTYNQLFEENPINASGVDAKAILSARLSKSRRLENLIAQLPGEKKNGLFGNLIALSLGLTPNFKSNFDLAEDAKLQLSKDTYDDDLDNLLAQIGDQYADLFLAAKNLSDAILLSDILRVNTEITKAPLSASMIKRYDEHHQDLTLLKALVRQQLPEKYKEIFFDQSKNGYAGYIDGGASQEEFYKFIKPILEKMDGTEELLVKLNREDLLRKQRTFDNGSIPHQIHLGELHAILRRQEDFYPFLKDNREKIEKILTFRIPYYVGPLARGNSRFAWMTRKSEETITPWNFEEVVDKGASAQSFIERMTNFDKNLPNEKVLPKHSLLYEYFTVYNELTKVKYVTEGMRKPAFLSGEQKKAIVDLLFKTNRKVTVKQLKEDYFKKIECFDSVEISGVEDRFNASLGTYHDLLKIIKDKDFLDNEENEDILEDIVLTLTLFEDREMIEERLKTYAHLFDDKVMKQLKRRRYTGWGRLSRKLINGIRDKQSGKTILDFLKSDGFANRNFMQLIHDDSLTFKEDIQKAQVSGQGDSLHEHIANLAGSPAIKKGILQTVKVVDELVKVMGRHKPENIVIEMARENQTTQKGQKNSRERMKRIEEGIKELGSQILKEHPVENTQLQNEKLYLYYLQNGRDMYVDQELDINRLSDYDVDHIVPQSFLKDDSIDNKVLTRSDKARGKSDNVPSEEVVKKMKNYWRQLLNAKLITQRKFDNLTKAERGGLSELDKAGFIKRQLVETRQITKHVAQILDSRMNTKYDENDKLIREVKVITLKSKLVSDFRKDFQFYKVREINNYHHAHDAYLNAVVGTALIKKYPKLESEFVYGDYKVYDVRKMIAKSEQEIGKATAKYFFYSNIMNFFKTEITLANGEIRKRPLIETNGETGEIVWDKGRDFATVRKVLSMPQVNIVKKTEVQTGGFSKESILPKRNSDKLIARKKDWDPKKYGGFDSPTVAYSVLVVAKVEKGKSKKLKSVKELLGITIMERSSFEKNPIDFLEAKGYKEVKKDLIIKLPKYSLFELENGRKRMLASAGELQKGNELALPSKYVNFLYLASHYEKLKGSPEDNEQKQLFVEQHKHYLDEIIEQISEFSKRVILADANLDKVLSAYNKHRDKPIREQAENIIHLFTLTNLGAPAAFKYFDTTIDRKRYTSTKEVLDATLIHQSITGLYETRIDLSQLGGDGGGGSPAPEAAAKGGTLGDQGSRGSDPLPEPRVTLTVEGIPTEFLVNTGAEHSVLTKPMGKMGSKRTVVAGATGSKVYPWTTKRLLKIGQKQVTHSFLVIPECPAPLLGRDLLTKLKAQIQFSTEGPQVTWEDRPAMCLVLNLEEEYRLHEKPVPPSIDPSWLQLFPMVWAEKAGMGLANQVPPVVVELKSDASPVAVRQYPMSKEAREGIRPHIQRFLDLGILVPCQSPWNTPLLPVKKPGTNDYRPVQDLREVNKRVQDIHPTVPNPYNLLSSLPPSHTWYSVLDLKDAFFCLKLHPNSQPLFAFEWRDPEKGNTGQLTWTRLPQGFKNSPTLFNEALHRDLASFRALNPQVVMLQYVDDLLVAAPTYRDCKEGTRRLLQELSKLGYRVSAKKAQLCREEVTYLGYLLKGGKRWLTPARKATVMKIPTPTTPRQVREFLGTAGFCRLWIPGFASLAAPLYPLTRPKVPFTWTEAHQEAFGRIKEALLSAPALALPDLTKPFALYVDEKEGVARGVLTQTLGPWRRPVAYLSKKLDPVASGWPTCLKAIAAVALLLKDADKLTLGQNVLVIAPHNLESIVRQPPDRWMTNARMTHYQSLLLNERVSFAPPAILNPATLLPVESDDTPIHICSEILAEETGTRPDLRDQPLPGVPAWYTDGSSFIMDGRRQAGAAIVDNKRTVWASNLPEGTSAQKAELIALTQALRLAEGKSINIYTDSRYAFATAHVHGAIYKQRGWLTSAGKDIKNKEEILALLEAIHLPKRVAIIHCPGHQRGTDPVATGNRKADEAAKQAAQSTRILTETTKNAGKRTADGSEFEKRTADGSEFESPKKKAKVE

SEQ ID NO: 7206 - protein, 2096 aa, synthetic construct
MPAAKRVKLDGGDKKYSIGLDIGTNSVGWAVITDEYKVPSKKFKVLGNTDRHSIKKNLIGALLFDSGETAEATRLKRTARRRYTRRKNRICYLQEIFSNEMAKVDDSFFHRLEESFLVEEDKKHERHPIFGNIVDEVAYHEKYPTIYHLRKKLVDSTDKADLRLIYLALAHMIKFRGHFLIEGDLNPDNSDVDKLFIQLVQTYNQLFEENPINASGVDAKAILSARLSKSRRLENLIAQLPGEKKNGLFGNLIALSLGLTPNFKSNFDLAEDAKLQLSKDTYDDDLDNLLAQIGDQYADLFLAAKNLSDAILLSDILRVNTEITKAPLSASMIKRYDEHHQDLTLLKALVRQQLPEKYKEIFFDQSKNGYAGYIDGGASQEEFYKFIKPILEKMDGTEELLVKLNREDLLRKQRTFDNGSIPHQIHLGELHAILRRQEDFYPFLKDNREKIEKILTFRIPYYVGPLARGNSRFAWMTRKSEETITPWNFEEVVDKGASAQSFIERMTNFDKNLPNEKVLPKHSLLYEYFTVYNELTKVKYVTEGMRKPAFLSGEQKKAIVDLLFKTNRKVTVKQLKEDYFKKIECFDSVEISGVEDRFNASLGTYHDLLKIIKDKDFLDNEENEDILEDIVLTLTLFEDREMIEERLKTYAHLFDDKVMKQLKRRRYTGWGRLSRKLINGIRDKQSGKTILDFLKSDGFANRNFMQLIHDDSLTFKEDIQKAQVSGQGDSLHEHIANLAGSPAIKKGILQTVKVVDELVKVMGRHKPENIVIEMARENQTTQKGQKNSRERMKRIEEGIKELGSQILKEHPVENTQLQNEKLYLYYLQNGRDMYVDQELDINRLSDYDVDHIVPQSFLKDDSIDNKVLTRSDKARGKSDNVPSEEVVKKMKNYWRQLLNAKLITQRKFDNLTKAERGGLSELDKAGFIKRQLVETRQITKHVAQILDSRMNTKYDENDKLIREVKVITLKSKLVSDFRKDFQFYKVREINNYHHAHDAYLNAVVGTALIKKYPKLESEFVYGDYKVYDVRKMIAKSEQEIGKATAKYFFYSNIMNFFKTEITLANGEIRKRPLIETNGETGEIVWDKGRDFATVRKVLSMPQVNIVKKTEVQTGGFSKESILPKRNSDKLIARKKDWDPKKYGGFDSPTVAYSVLVVAKVEKGKSKKLKSVKELLGITIMERSSFEKNPIDFLEAKGYKEVKKDLIIKLPKYSLFELENGRKRMLASAGELQKGNELALPSKYVNFLYLASHYEKLKGSPEDNEQKQLFVEQHKHYLDEIIEQISEFSKRVILADANLDKVLSAYNKHRDKPIREQAENIIHLFTLTNLGAPAAFKYFDTTIDRKRYTSTKEVLDATLIHQSITGLYETRIDLSQLGGDGGGGSPAPEAAAKGGTLNIEDEHRLHETSKEPDVSLGSTWLSDFPQAWAETGGMGLAVRQAPLIIPLKATSTPVSIKQYPMSQEARLGIKPHIQRLLDQGILVPCQSPWNTPLLPVKKPGTNDYRPVQDLREVNKRVEDIHPTVPNPYNLLSGLPPSHQWYTVLDLKDAFFCLRLHPTSQPLFAFEWRDPEMGISGQLTWTRLPQGFKNSPTLFDEALHRDLADFRIQHPDLILLQYVDDLLLAATSELDCQQGTRALLQTLGNLGYRASAKKAQICQKQVKYLGYLLKEGQRWLTEARKETVMGQPTPKTPRQLREFLGTAGFCRLWIPGFAEMAAPLYPLTKTGTLFNWGPDQQKAYQEIKQALLTAPALGLPDLTKPFELFVDEKQGYAKGVLTQKLGPWRRPVAYLSKKLDPVAAGWPPCLRMVAAIAVLTKDAGKLTMGQPLVILAPHAVEALVKQPPDRWLSNARMTHYQALLLDTDRVQFGPVVALNPATLLPLPEEGLQHNCLDILAEAHGTRPDLTDQPLPDADHTWYTDGSSLLQEGQRKAGAAVTTETEVIWAKALPAGTSAQRAELIALTQALKMAEGKKLNVYTDSRYAFATAHIHGEIYRRRGLLTSEGKEIKNKDEILALLKALFLPKRLSIIHCPGHQKGHSAEARGNRMADQAARKAAITETPDTSTLLAGKRTADGSEFEKRTADGSEFESPKKKAKVE

SEQ ID NO: 7207 - protein, 2090 aa, synthetic construct
MPAAKRVKLDGGDKKYSIGLDIGTNSVGWAVITDEYKVPSKKFKVLGNTDRHSIKKNLIGALLFDSGETAEATRLKRTARRRYTRRKNRICYLQEIFSNEMAKVDDSFFHRLEESFLVEEDKKHERHPIFGNIVDEVAYHEKYPTIYHLRKKLVDSTDKADLRLIYLALAHMIKFRGHFLIEGDLNPDNSDVDKLFIQLVQTYNQLFEENPINASGVDAKAILSARLSKSRRLENLIAQLPGEKKNGLFGNLIALSLGLTPNFKSNFDLAEDAKLQLSKDTYDDDLDNLLAQIGDQYADLFLAAKNLSDAILLSDILRVNTEITKAPLSASMIKRYDEHHQDLTLLKALVRQQLPEKYKEIFFDQSKNGYAGYIDGGASQEEFYKFIKPILEKMDGTEELLVKLNREDLLRKQRTFDNGSIPHQIHLGELHAILRRQEDFYPFLKDNREKIEKILTFRIPYYVGPLARGNSRFAWMTRKSEETITPWNFEEVVDKGASAQSFIERMTNFDKNLPNEKVLPKHSLLYEYFTVYNELTKVKYVTEGMRKPAFLSGEQKKAIVDLLFKTNRKVTVKQLKEDYFKKIECFDSVEISGVEDRFNASLGTYHDLLKIIKDKDFLDNEENEDILEDIVLTLTLFEDREMIEERLKTYAHLFDDKVMKQLKRRRYTGWGRLSRKLINGIRDKQSGKTILDFLKSDGFANRNFMQLIHDDSLTFKEDIQKAQVSGQGDSLHEHIANLAGSPAIKKGILQTVKVVDELVKVMGRHKPENIVIEMARENQTTQKGQKNSRERMKRIEEGIKELGSQILKEHPVENTQLQNEKLYLYYLQNGRDMYVDQELDINRLSDYDVDHIVPQSFLKDDSIDNKVLTRSDKARGKSDNVPSEEVVKKMKNYWRQLLNAKLITQRKFDNLTKAERGGLSELDKAGFIKRQLVETRQITKHVAQILDSRMNTKYDENDKLIREVKVITLKSKLVSDFRKDFQFYKVREINNYHHAHDAYLNAVVGTALIKKYPKLESEFVYGDYKVYDVRKMIAKSEQEIGKATAKYFFYSNIMNFFKTEITLANGEIRKRPLIETNGETGEIVWDKGRDFATVRKVLSMPQVNIVKKTEVQTGGFSKESILPKRNSDKLIARKKDWDPKKYGGFDSPTVAYSVLVVAKVEKGKSKKLKSVKELLGITIMERSSFEKNPIDFLEAKGYKEVKKDLIIKLPKYSLFELENGRKRMLASAGELQKGNELALPSKYVNFLYLASHYEKLKGSPEDNEQKQLFVEQHKHYLDEIIEQISEFSKRVILADANLDKVLSAYNKHRDKPIREQAENIIHLFTLTNLGAPAAFKYFDTTIDRKRYTSTKEVLDATLIHQSITGLYETRIDLSQLGGDGGGGSPAPEAAAKGGTLQLDDEYRLYSPLVKPDQNIQFWLEQFPQAWAETAGMGLAKQVPPQVIQLKASATPVSVRQYPLSKEAQEGIRPHVQRLIQQGILVPVQSPWNTPLLPVRKPGTNDYRPVQDLREVNKRVQDIHPTVPNPYNLLCALPPQRSWYTVLDLKDAFFCLRLHPTSQPLFAFEWRDPGTGRTGQLTWTRLPQGFKNSPTIFDEALHRDLANFRIQHPQVTLLQYVDDLLLAGATKQDCLEGTKALLLELSDLGYRASAKKAQICRREVTYLGYSLRDGQRWLTEARKKTVVQIPAPTTAKQVREFLGTAGFCRLWIPGFATLAAPLYPLTKEKGEFSWAPEHQKAFDAIKKALLSAPALALPDVTKPFTLYVDERKGVARGVLTQTLGPWRRPVAYLSKKLDPVASGWPVCLKAIAAVAILVKDADKLTLGQNITVIAPHALENIVRQPPDRWMTNARMTHYQSLLLTERVTFAPPAALNPATLLPEETDEPVTHDCHQLLIEETGVRKDLTDIPLTGEVLTWFTDGSSYVVEGKRMAGAAVVDGTRTIWASSLPEGTSAQKAELMALTQALRLAEGKSINIYTDSRYAFATAHVHGAIYKQRGLLTSAGREIKNKEEILSLLEALHLPKRLAIIHCPGHQKAKDPISRGNQMADRVAKQAAQGVNLLAGKRTADGSEFEKRTADGSEFESPKKKAKVE

SEQ ID NO: 7208 - protein, 2087 aa, synthetic construct
MPAAKRVKLDGGDKKYSIGLDIGTNSVGWAVITDEYKVPSKKFKVLGNTDRHSIKKNLIGALLFDSGETAEATRLKRTARRRYTRRKNRICYLQEIFSNEMAKVDDSFFHRLEESFLVEEDKKHERHPIFGNIVDEVAYHEKYPTIYHLRKKLVDSTDKADLRLIYLALAHMIKFRGHFLIEGDLNPDNSDVDKLFIQLVQTYNQLFEENPINASGVDAKAILSARLSKSRRLENLIAQLPGEKKNGLFGNLIALSLGLTPNFKSNFDLAEDAKLQLSKDTYDDDLDNLLAQIGDQYADLFLAAKNLSDAILLSDILRVNTEITKAPLSASMIKRYDEHHQDLTLLKALVRQQLPEKYKEIFFDQSKNGYAGYIDGGASQEEFYKFIKPILEKMDGTEELLVKLNREDLLRKQRTFDNGSIPHQIHLGELHAILRRQEDFYPFLKDNREKIEKILTFRIPYYVGPLARGNSRFAWMTRKSEETITPWNFEEVVDKGASAQSFIERMTNFDKNLPNEKVLPKHSLLYEYFTVYNELTKVKYVTEGMRKPAFLSGEQKKAIVDLLFKTNRKVTVKQLKEDYFKKIECFDSVEISGVEDRFNASLGTYHDLLKIIKDKDFLDNEENEDILEDIVLTLTLFEDREMIEERLKTYAHLFDDKVMKQLKRRRYTGWGRLSRKLINGIRDKQSGKTILDFLKSDGFANRNFMQLIHDDSLTFKEDIQKAQVSGQGDSLHEHIANLAGSPAIKKGILQTVKVVDELVKVMGRHKPENIVIEMARENQTTQKGQKNSRERMKRIEEGIKELGSQILKEHPVENTQLQNEKLYLYYLQNGRDMYVDQELDINRLSDYDVDHIVPQSFLKDDSIDNKVLTRSDKARGKSDNVPSEEVVKKMKNYWRQLLNAKLITQRKFDNLTKAERGGLSELDKAGFIKRQLVETRQITKHVAQILDSRMNTKYDENDKLIREVKVITLKSKLVSDFRKDFQFYKVREINNYHHAHDAYLNAVVGTALIKKYPKLESEFVYGDYKVYDVRKMIAKSEQEIGKATAKYFFYSNIMNFFKTEITLANGEIRKRPLIETNGETGEIVWDKGRDFATVRKVLSMPQVNIVKKTEVQTGGFSKESILPKRNSDKLIARKKDWDPKKYGGFDSPTVAYSVLVVAKVEKGKSKKLKSVKELLGITIMERSSFEKNPIDFLEAKGYKEVKKDLIIKLPKYSLFELENGRKRMLASAGELQKGNELALPSKYVNFLYLASHYEKLKGSPEDNEQKQLFVEQHKHYLDEIIEQISEFSKRVILADANLDKVLSAYNKHRDKPIREQAENIIHLFTLTNLGAPAAFKYFDTTIDRKRYTSTKEVLDATLIHQSITGLYETRIDLSQLGGDGGGGSPAPEAAAKGGIPWLMKKPLQLTTLVPLQEYEERLLKQTMLTGSYKEKLQSLFLKYDALWQHWENQVGHRRIKPHHIATGTVNPRPQKQYPINPKAKASIQTVINDLLKQGVLIQQNSIMNTPVYPVPKPDGKWRMVLDYREVNKTIPLIAAQNQHSAGILSSIFRGKYKTTLDLSNGFWAHSITPESYWLTAFTWLGQQYCWTRLPQGFLNSPALFNADVVDLLKEVPNVQVYVDDIYISHDDPREHLEQLEKVFSLLLNAGYVVSLKKSEIAQHEVEFLGFNITKEGRGLTETFKQKLLNITPPRDLKQLQSILGLLNFARNFIPNFSELVKPLYNIIATAPGKYITWTTDNSQQLQNIISMLNSAENLEERNPEVRLIMKVNTSPSAGYIRFYNEFAKRPIMYLNYVYTKAEVKFTNTEKLLTTIHKGLIKALDLGMGQEILVYSPIVSMTKIQKTPLPERKALPIRWITWMSYLEDPRIQFHYDKTLPELQQVPTVTDDIIAKIKHPSEFSMVFYTDGSAIKHPNVNKSHNAGMGIAQVQFKPEFTVINTWSIPLGDHTAQLAEVAAVEFACKKALKIDGPVLIVTDSFYVAESVNKELPYWQSNGFFNNKKKPLKHVSKWKSIADCIQLKPDIIIIHEKGHQPTASTFHTEGNNLADKLATQGSYVVNAGKRTADGSEFEKRTADGSEFESPKKKAKVE

SEQ ID NO: 7209 - protein, 2094 aa, synthetic construct
MPAAKRVKLDGGDKKYSIGLDIGTNSVGWAVITDEYKVPSKKFKVLGNTDRHSIKKNLIGALLFDSGETAEATRLKRTARRRYTRRKNRICYLQEIFSNEMAKVDDSFFHRLEESFLVEEDKKHERHPIFGNIVDEVAYHEKYPTIYHLRKKLVDSTDKADLRLIYLALAHMIKFRGHFLIEGDLNPDNSDVDKLFIQLVQTYNQLFEENPINASGVDAKAILSARLSKSRRLENLIAQLPGEKKNGLFGNLIALSLGLTPNFKSNFDLAEDAKLQLSKDTYDDDLDNLLAQIGDQYADLFLAAKNLSDAILLSDILRVNTEITKAPLSASMIKRYDEHHQDLTLLKALVRQQLPEKYKEIFFDQSKNGYAGYIDGGASQEEFYKFIKPILEKMDGTEELLVKLNREDLLRKQRTFDNGSIPHQIHLGELHAILRRQEDFYPFLKDNREKIEKILTFRIPYYVGPLARGNSRFAWMTRKSEETITPWNFEEVVDKGASAQSFIERMTNFDKNLPNEKVLPKHSLLYEYFTVYNELTKVKYVTEGMRKPAFLSGEQKKAIVDLLFKTNRKVTVKQLKEDYFKKIECFDSVEISGVEDRFNASLGTYHDLLKIIKDKDFLDNEENEDILEDIVLTLTLFEDREMIEERLKTYAHLFDDKVMKQLKRRRYTGWGRLSRKLINGIRDKQSGKTILDFLKSDGFANRNFMQLIHDDSLTFKEDIQKAQVSGQGDSLHEHIANLAGSPAIKKGILQTVKVVDELVKVMGRHKPENIVIEMARENQTTQKGQKNSRERMKRIEEGIKELGSQILKEHPVENTQLQNEKLYLYYLQNGRDMYVDQELDINRLSDYDVDHIVPQSFLKDDSIDNKVLTRSDKARGKSDNVPSEEVVKKMKNYWRQLLNAKLITQRKFDNLTKAERGGLSELDKAGFIKRQLVETRQITKHVAQILDSRMNTKYDENDKLIREVKVITLKSKLVSDFRKDFQFYKVREINNYHHAHDAYLNAVVGTALIKKYPKLESEFVYGDYKVYDVRKMIAKSEQEIGKATAKYFFYSNIMNFFKTEITLANGEIRKRPLIETNGETGEIVWDKGRDFATVRKVLSMPQVNIVKKTEVQTGGFSKESILPKRNSDKLIARKKDWDPKKYGGFDSPTVAYSVLVVAKVEKGKSKKLKSVKELLGITIMERSSFEKNPIDFLEAKGYKEVKKDLIIKLPKYSLFELENGRKRMLASAGELQKGNELALPSKYVNFLYLASHYEKLKGSPEDNEQKQLFVEQHKHYLDEIIEQISEFSKRVILADANLDKVLSAYNKHRDKPIREQAENIIHLFTLTNLGAPAAFKYFDTTIDRKRYTSTKEVLDATLIHQSITGLYETRIDLSQLGGDGGGGSPAPEAAAKGGVLNLEEEYRLHEKPVPSSIDPSWLQLFPTVWAERAGMGLANQVPPVVVELRSGASPVAVRQYPMSKEAREGIRPHIQRFLDLGVLVPCQSPWNTPLLPVKKPGTNDYRPVQDLREINKRVQDIHPTVPNPYNLLSSLPPSHTWYSVLDLKDAFFCLKLHPNSQPLFAFEWRDPEKGNTGQLTWTRLPQGFKNSPTLFNEALHRDLAPFRALNPQVVLLQYVDDLLVAAPTYRDCKEGTQKLLQELSKLGYRVSAKKAQLCQKEVTYLGYLLKEGKRWLTPARKATVMKIPPPTTPRQVREFLGTAGFCRLWIPGFASLAAPLYPLTKPSIPFIWTEEHQKAFDRIKEALLSAPALALPDLTKPFTLYVDERAGVARGVLTQTLGPWRRPVAYLSKKLDPVASGWPTCLKAVAAVALLLKDADKLTLGQNVTVIASHSLESIVRQPPDRWMTNARMTHYQSLLLNERVSFAPPAVLNPATLLPVESEATPVHRCSEILAEETGTRRDLKDQPLPGVPAWYTDGSSFIAEGKRRAGAAIVDGKRTVWASSLPEGTSAQKAELVALTQALRLAEGKDINIYTDSRYAFATAHIHGAIYKQRGWLTSAGKDIKNKEEILALLEAIHLPKRVAIIHCPGHQKGNDPVATGNRRADEAAKQAALSTRVLAETTKPAGKRTADGSEFEKRTADGSEFESPKKKAKVE

SEQ ID NO: 7210 - protein, 2102 aa, synthetic construct
MPAAKRVKLDGGDKKYSIGLDIGTNSVGWAVITDEYKVPSKKFKVLGNTDRHSIKKNLIGALLFDSGETAEATRLKRTARRRYTRRKNRICYLQEIFSNEMAKVDDSFFHRLEESFLVEEDKKHERHPIFGNIVDEVAYHEKYPTIYHLRKKLVDSTDKADLRLIYLALAHMIKFRGHFLIEGDLNPDNSDVDKLFIQLVQTYNQLFEENPINASGVDAKAILSARLSKSRRLENLIAQLPGEKKNGLFGNLIALSLGLTPNFKSNFDLAEDAKLQLSKDTYDDDLDNLLAQIGDQYADLFLAAKNLSDAILLSDILRVNTEITKAPLSASMIKRYDEHHQDLTLLKALVRQQLPEKYKEIFFDQSKNGYAGYIDGGASQEEFYKFIKPILEKMDGTEELLVKLNREDLLRKQRTFDNGSIPHQIHLGELHAILRRQEDFYPFLKDNREKIEKILTFRIPYYVGPLARGNSRFAWMTRKSEETITPWNFEEVVDKGASAQSFIERMTNFDKNLPNEKVLPKHSLLYEYFTVYNELTKVKYVTEGMRKPAFLSGEQKKAIVDLLFKTNRKVTVKQLKEDYFKKIECFDSVEISGVEDRFNASLGTYHDLLKIIKDKDFLDNEENEDILEDIVLTLTLFEDREMIEERLKTYAHLFDDKVMKQLKRRRYTGWGRLSRKLINGIRDKQSGKTILDFLKSDGFANRNFMQLIHDDSLTFKEDIQKAQVSGQGDSLHEHIANLAGSPAIKKGILQTVKVVDELVKVMGRHKPENIVIEMARENQTTQKGQKNSRERMKRIEEGIKELGSQILKEHPVENTQLQNEKLYLYYLQNGRDMYVDQELDINRLSDYDVDHIVPQSFLKDDSIDNKVLTRSDKARGKSDNVPSEEVVKKMKNYWRQLLNAKLITQRKFDNLTKAERGGLSELDKAGFIKRQLVETRQITKHVAQILDSRMNTKYDENDKLIREVKVITLKSKLVSDFRKDFQFYKVREINNYHHAHDAYLNAVVGTALIKKYPKLESEFVYGDYKVYDVRKMIAKSEQEIGKATAKYFFYSNIMNFFKTEITLANGEIRKRPLIETNGETGEIVWDKGRDFATVRKVLSMPQVNIVKKTEVQTGGFSKESILPKRNSDKLIARKKDWDPKKYGGFDSPTVAYSVLVVAKVEKGKSKKLKSVKELLGITIMERSSFEKNPIDFLEAKGYKEVKKDLIIKLPKYSLFELENGRKRMLASAGELQKGNELALPSKYVNFLYLASHYEKLKGSPEDNEQKQLFVEQHKHYLDEIIEQISEFSKRVILADANLDKVLSAYNKHRDKPIREQAENIIHLFTLTNLGAPAAFKYFDTTIDRKRYTSTKEVLDATLIHQSITGLYETRIDLSQLGGDGGEAAAKGGSPAPGGTVSLQDEHRLFDIPVTTSLPDVWLQDFPQAWAETGGLGRAKCQAPIIIDLKPTAVPVSIKQYPMSLEAHMGIRQHIIKFLELGVLRPCRSPWNTPLLPVKKPGTQDYRPVQDLREINKRTVDIHPTVPNPYNLLSTLKPDYSWYTVLDLKDAFFCLPLAPQSQELFAFEWKDPERGISGQLTWTRLPQGFKNSPTLFNEALHRDLTDFRTQHPEVTLLQYVDDLLLAAPTKKACTQGTRHLLQELGEKGYRASAKKAQICQTKVTYLGYILSEGKRWLTPGRIETVARIPPPRNPREVREFLGTAGFCRLWIPGFAELAAPLYALTKPSTPFTWQTEHQLAFEALKKALLSAPALGLPDTSKPFTLFLDERQGIAKGVLTQKLGPWKRPVAYLSKKLDPVAAGWPPCLRIMAATAMLVKDSAKLTLGQPLTVITPHTLEAIVRQPPDRWITNARLTHYQALLLDTDRVQFGPPVTLNPATLLPVPENQPSPHDCRQVLAETHGTREDLKDQELPDADHTWYTDGSSYLDSGTRRAGAAVVDGHNTIWAQSLPPGTSAQKAELIALTKALELSKGKKANIYTDSRYAFATAHTHGSIYERRGWLTSEGKEIKNKAEIIALLKALFLPQEVAIIHCPGHQKGQDPVAVGNRQADRVARQAAMAEVLTLATEPDNTSHITAGKRTADGSEFEKRTADGSEFESPKKKAKVE

SEQ ID NO: 7211 - protein, 2087 aa, synthetic construct
MPAAKRVKLDGGDKKYSIGLDIGTNSVGWAVITDEYKVPSKKFKVLGNTDRHSIKKNLIGALLFDSGETAEATRLKRTARRRYTRRKNRICYLQEIFSNEMAKVDDSFFHRLEESFLVEEDKKHERHPIFGNIVDEVAYHEKYPTIYHLRKKLVDSTDKADLRLIYLALAHMIKFRGHFLIEGDLNPDNSDVDKLFIQLVQTYNQLFEENPINASGVDAKAILSARLSKSRRLENLIAQLPGEKKNGLFGNLIALSLGLTPNFKSNFDLAEDAKLQLSKDTYDDDLDNLLAQIGDQYADLFLAAKNLSDAILLSDILRVNTEITKAPLSASMIKRYDEHHQDLTLLKALVRQQLPEKYKEIFFDQSKNGYAGYIDGGASQEEFYKFIKPILEKMDGTEELLVKLNREDLLRKQRTFDNGSIPHQIHLGELHAILRRQEDFYPFLKDNREKIEKILTFRIPYYVGPLARGNSRFAWMTRKSEETITPWNFEEVVDKGASAQSFIERMTNFDKNLPNEKVLPKHSLLYEYFTVYNELTKVKYVTEGMRKPAFLSGEQKKAIVDLLFKTNRKVTVKQLKEDYFKKIECFDSVEISGVEDRFNASLGTYHDLLKIIKDKDFLDNEENEDILEDIVLTLTLFEDREMIEERLKTYAHLFDDKVMKQLKRRRYTGWGRLSRKLINGIRDKQSGKTILDFLKSDGFANRNFMQLIHDDSLTFKEDIQKAQVSGQGDSLHEHIANLAGSPAIKKGILQTVKVVDELVKVMGRHKPENIVIEMARENQTTQKGQKNSRERMKRIEEGIKELGSQILKEHPVENTQLQNEKLYLYYLQNGRDMYVDQELDINRLSDYDVDHIVPQSFLKDDSIDNKVLTRSDKARGKSDNVPSEEVVKKMKNYWRQLLNAKLITQRKFDNLTKAERGGLSELDKAGFIKRQLVETRQITKHVAQILDSRMNTKYDENDKLIREVKVITLKSKLVSDFRKDFQFYKVREINNYHHAHDAYLNAVVGTALIKKYPKLESEFVYGDYKVYDVRKMIAKSEQEIGKATAKYFFYSNIMNFFKTEITLANGEIRKRPLIETNGETGEIVWDKGRDFATVRKVLSMPQVNIVKKTEVQTGGFSKESILPKRNSDKLIARKKDWDPKKYGGFDSPTVAYSVLVVAKVEKGKSKKLKSVKELLGITIMERSSFEKNPIDFLEAKGYKEVKKDLIIKLPKYSLFELENGRKRMLASAGELQKGNELALPSKYVNFLYLASHYEKLKGSPEDNEQKQLFVEQHKHYLDEIIEQISEFSKRVILADANLDKVLSAYNKHRDKPIREQAENIIHLFTLTNLGAPAAFKYFDTTIDRKRYTSTKEVLDATLIHQSITGLYETRIDLSQLGGDGGEAAAKGGSPAPGGVPWILKKPLELTIKLDLEEQQGTLLNNSILSKKGKEELKQLFEKYSALWQSWENQVGHRRIRPHKIATGTVKPTPQKQYHINPKAKPDIQIVINDLLKQGVLIQKESTMNTPVYPVPKPNGRWRMVLDYRAVNKVTPLIAVQNQHSYGILGSLFKGRYKTTIDLSNGFWAHPIVPEDYWITAFTWQGKQYCWTVLPQGFLNSPGLFNGDVVDLLQGIPNVEVYVDDVYISHDSEKEHLEYLDILFNRLKEAGYIISLKKSNIANSIVDFLGFQITNEGRGLTDTFKEKLENITAPTTLKQLQSILGLLNFARNFIPDFTELIAPLYALIPKSPKNYVPWQIEHSTTLETLITKLNGAEYLQGRKGDKTLIMKVNASYTTGYIRYYNEGEKKPISYVSIVFSKTELKFTELEKLLTTVHKGLLKALDLSMGQNIHVYSPIVSMQNIQKTPQTAKKALASRWLSWLSYLEDPRIRFFYDPQMPALKDLPAVDTGKDNKKHPSNFQHIFYTDGSAITSPTKEGHLNAGMGIVYFINKDGNLQKQQEWSISLGNHTAQFAEIAAFEFALKKCLPLGGNILVVTDSNYVAKAYNEELDVWASNGFVNNRKKPLKHISKWKSVADLKRLRPDVVVTHEPGHQKLDSSPHAYGNNLADQLATQASFKVHAGKRTADGSEFEKRTADGSEFESPKKKAKVE

SEQ ID NO: 7212 - protein, 2095 aa, synthetic construct
MPAAKRVKLDGGDKKYSIGLDIGTNSVGWAVITDEYKVPSKKFKVLGNTDRHSIKKNLIGALLFDSGETAEATRLKRTARRRYTRRKNRICYLQEIFSNEMAKVDDSFFHRLEESFLVEEDKKHERHPIFGNIVDEVAYHEKYPTIYHLRKKLVDSTDKADLRLIYLALAHMIKFRGHFLIEGDLNPDNSDVDKLFIQLVQTYNQLFEENPINASGVDAKAILSARLSKSRRLENLIAQLPGEKKNGLFGNLIALSLGLTPNFKSNFDLAEDAKLQLSKDTYDDDLDNLLAQIGDQYADLFLAAKNLSDAILLSDILRVNTEITKAPLSASMIKRYDEHHQDLTLLKALVRQQLPEKYKEIFFDQSKNGYAGYIDGGASQEEFYKFIKPILEKMDGTEELLVKLNREDLLRKQRTFDNGSIPHQIHLGELHAILRRQEDFYPFLKDNREKIEKILTFRIPYYVGPLARGNSRFAWMTRKSEETITPWNFEEVVDKGASAQSFIERMTNFDKNLPNEKVLPKHSLLYEYFTVYNELTKVKYVTEGMRKPAFLSGEQKKAIVDLLFKTNRKVTVKQLKEDYFKKIECFDSVEISGVEDRFNASLGTYHDLLKIIKDKDFLDNEENEDILEDIVLTLTLFEDREMIEERLKTYAHLFDDKVMKQLKRRRYTGWGRLSRKLINGIRDKQSGKTILDFLKSDGFANRNFMQLIHDDSLTFKEDIQKAQVSGQGDSLHEHIANLAGSPAIKKGILQTVKVVDELVKVMGRHKPENIVIEMARENQTTQKGQKNSRERMKRIEEGIKELGSQILKEHPVENTQLQNEKLYLYYLQNGRDMYVDQELDINRLSDYDVDHIVPQSFLKDDSIDNKVLTRSDKARGKSDNVPSEEVVKKMKNYWRQLLNAKLITQRKFDNLTKAERGGLSELDKAGFIKRQLVETRQITKHVAQILDSRMNTKYDENDKLIREVKVITLKSKLVSDFRKDFQFYKVREINNYHHAHDAYLNAVVGTALIKKYPKLESEFVYGDYKVYDVRKMIAKSEQEIGKATAKYFFYSNIMNFFKTEITLANGEIRKRPLIETNGETGEIVWDKGRDFATVRKVLSMPQVNIVKKTEVQTGGFSKESILPKRNSDKLIARKKDWDPKKYGGFDSPTVAYSVLVVAKVEKGKSKKLKSVKELLGITIMERSSFEKNPIDFLEAKGYKEVKKDLIIKLPKYSLFELENGRKRMLASAGELQKGNELALPSKYVNFLYLASHYEKLKGSPEDNEQKQLFVEQHKHYLDEIIEQISEFSKRVILADANLDKVLSAYNKHRDKPIREQAENIIHLFTLTNLGAPAAFKYFDTTIDRKRYTSTKEVLDATLIHQSITGLYETRIDLSQLGGDGGEAAAKGGSPAPGGTLQLEEEYRLFEPESTQKQEMDIWLKNFPQAWAETGGMGTAHCQAPVLIQLKATATPISIRQYPMPHEAYQGIKPHIRRMLDQGILKPCQSPWNTPLLPVKKPGTEDYRPVQDLREVNKRVEDIHPTVPNPYNLLSTLPPSHPWYTVLDLKDAFFCLRLHSESQLLFAFEWRDPEIGLSGQLTWTRLPQGFKNSPTLFNEALHSDLADFRVRYPALVLLQYVDDLLLAAATRTECLEGTKALLETLGNKGYRASAKKAQICLQEVTYLGYSLKDGQRWLTKARKEAILSIPVPKNSRQVREFLGKAGYCRLFIPGFAELAAPLYPLTRPGTLFQWGTEQQLAFEDIKKALLSSPALGLPDITKPFELFIDENSGFAKGVLVQKLGPWKRPVAYLSKKLDTVASGWPPCLRMVAAIAILVKDAGKLTLGQPLTILTSHPVEALVRQPPNKWLSNARMTHYQAMLLDAERVHFGPTVSLNPATLLPLPSGGNHHDCLQILAETHGTRPDLTDQPLPDADLTWYTDGSSFIRNGEREAGAAVTTESEVIWAAPLPPGTSAQRAELIALTQALKMAEGKKLTVYTDSRYAFATTHVHGEIYRRRGWLTSEGKEIKNKNEILALLEALFLPKRLSIIHCPGHQKGDSPQAKGNRLADDTAKKAATETHSSLTVLPAGKRTADGSEFEKRTADGSEFESPKKKAKVE

SEQ ID NO: 7213 - protein, 2176 aa, synthetic construct
MPAAKRVKLDGGDKKYSIGLDIGTNSVGWAVITDEYKVPSKKFKVLGNTDRHSIKKNLIGALLFDSGETAEATRLKRTARRRYTRRKNRICYLQEIFSNEMAKVDDSFFHRLEESFLVEEDKKHERHPIFGNIVDEVAYHEKYPTIYHLRKKLVDSTDKADLRLIYLALAHMIKFRGHFLIEGDLNPDNSDVDKLFIQLVQTYNQLFEENPINASGVDAKAILSARLSKSRRLENLIAQLPGEKKNGLFGNLIALSLGLTPNFKSNFDLAEDAKLQLSKDTYDDDLDNLLAQIGDQYADLFLAAKNLSDAILLSDILRVNTEITKAPLSASMIKRYDEHHQDLTLLKALVRQQLPEKYKEIFFDQSKNGYAGYIDGGASQEEFYKFIKPILEKMDGTEELLVKLNREDLLRKQRTFDNGSIPHQIHLGELHAILRRQEDFYPFLKDNREKIEKILTFRIPYYVGPLARGNSRFAWMTRKSEETITPWNFEEVVDKGASAQSFIERMTNFDKNLPNEKVLPKHSLLYEYFTVYNELTKVKYVTEGMRKPAFLSGEQKKAIVDLLFKTNRKVTVKQLKEDYFKKIECFDSVEISGVEDRFNASLGTYHDLLKIIKDKDFLDNEENEDILEDIVLTLTLFEDREMIEERLKTYAHLFDDKVMKQLKRRRYTGWGRLSRKLINGIRDKQSGKTILDFLKSDGFANRNFMQLIHDDSLTFKEDIQKAQVSGQGDSLHEHIANLAGSPAIKKGILQTVKVVDELVKVMGRHKPENIVIEMARENQTTQKGQKNSRERMKRIEEGIKELGSQILKEHPVENTQLQNEKLYLYYLQNGRDMYVDQELDINRLSDYDVDHIVPQSFLKDDSIDNKVLTRSDKARGKSDNVPSEEVVKKMKNYWRQLLNAKLITQRKFDNLTKAERGGLSELDKAGFIKRQLVETRQITKHVAQILDSRMNTKYDENDKLIREVKVITLKSKLVSDFRKDFQFYKVREINNYHHAHDAYLNAVVGTALIKKYPKLESEFVYGDYKVYDVRKMIAKSEQEIGKATAKYFFYSNIMNFFKTEITLANGEIRKRPLIETNGETGEIVWDKGRDFATVRKVLSMPQVNIVKKTEVQTGGFSKESILPKRNSDKLIARKKDWDPKKYGGFDSPTVAYSVLVVAKVEKGKSKKLKSVKELLGITIMERSSFEKNPIDFLEAKGYKEVKKDLIIKLPKYSLFELENGRKRMLASAGELQKGNELALPSKYVNFLYLASHYEKLKGSPEDNEQKQLFVEQHKHYLDEIIEQISEFSKRVILADANLDKVLSAYNKHRDKPIREQAENIIHLFTLTNLGAPAAFKYFDTTIDRKRYTSTKEVLDATLIHQSITGLYETRIDLSQLGGDGGEAAAKGGSPAPGGMNPLQLLQPLPAEIKGTKLLAHWNSGATITCIPESFLEDEQPIKKTLIKTIHGEKQQNVYYVTFKVKGRKVEAEVIASPYEYILLSPTDVPWLTQQPLQLTILVPLQEYQEKILSKTALPEDQKQQLKTLFVKYDNLWQHWENQVGHRKIRPHNIATGDYPPRPQKQYPINPKAKPSIQIVIDDLLKQGVLTPQNSTMNTPVYPVPKPDGRWRMVLDYREVNKTIPLTAAQNQHSAGILATIVRQKYKTTLDLANGFWAHPITPESYWLTAFTWQGKQYCWTRLPQGFLNSPALFNADVVDLLKEIPNVQVYVDDIYLSHDDPKEHVQQLEKVFQILLQAGYVVSLKKSEIGQKTVEFLGFNITKEGRGLTDTFKTKLLNITPPKDLKQLQSILGKLNFARNFIPNFAELVQPLYNLIAPAKGKYIEWSEENTKQLNMVIEALNTASNLEERLPEQRLVIKVNTSPSAGYVRYYNETGKKPIMYLNYVFSKAELKFSMLEKLLTTMHKALIKAMDLAMGQEILVYSPIVSMTKIQKTPLPERKALPIRWITWMTYLEDPRIQFHYDKTLPELKHIPDVYTSSQSPVKHPSQYEGVFYTDGSAIKSPDPTKSNNAGMGIVHATYKPEYQVLNQWSIPLGNHTAQMAEIAAVEFACKKALKIPGPVLVITDSFYVAESANKELPYWKSNGFVNNKKKPLKHISKWKSIAECLSMKPDITIQHEKGISLQIPVFILKGNALADKLATQGSYVVNAGKRTADGSEFEKRTADGSEFESPKKKAKVE

SEQ ID NO: 7214 - protein, 2094 aa, synthetic construct
MPAAKRVKLDGGDKKYSIGLDIGTNSVGWAVITDEYKVPSKKFKVLGNTDRHSIKKNLIGALLFDSGETAEATRLKRTARRRYTRRKNRICYLQEIFSNEMAKVDDSFFHRLEESFLVEEDKKHERHPIFGNIVDEVAYHEKYPTIYHLRKKLVDSTDKADLRLIYLALAHMIKFRGHFLIEGDLNPDNSDVDKLFIQLVQTYNQLFEENPINASGVDAKAILSARLSKSRRLENLIAQLPGEKKNGLFGNLIALSLGLTPNFKSNFDLAEDAKLQLSKDTYDDDLDNLLAQIGDQYADLFLAAKNLSDAILLSDILRVNTEITKAPLSASMIKRYDEHHQDLTLLKALVRQQLPEKYKEIFFDQSKNGYAGYIDGGASQEEFYKFIKPILEKMDGTEELLVKLNREDLLRKQRTFDNGSIPHQIHLGELHAILRRQEDFYPFLKDNREKIEKILTFRIPYYVGPLARGNSRFAWMTRKSEETITPWNFEEVVDKGASAQSFIERMTNFDKNLPNEKVLPKHSLLYEYFTVYNELTKVKYVTEGMRKPAFLSGEQKKAIVDLLFKTNRKVTVKQLKEDYFKKIECFDSVEISGVEDRFNASLGTYHDLLKIIKDKDFLDNEENEDILEDIVLTLTLFEDREMIEERLKTYAHLFDDKVMKQLKRRRYTGWGRLSRKLINGIRDKQSGKTILDFLKSDGFANRNFMQLIHDDSLTFKEDIQKAQVSGQGDSLHEHIANLAGSPAIKKGILQTVKVVDELVKVMGRHKPENIVIEMARENQTTQKGQKNSRERMKRIEEGIKELGSQILKEHPVENTQLQNEKLYLYYLQNGRDMYVDQELDINRLSDYDVDHIVPQSFLKDDSIDNKVLTRSDKARGKSDNVPSEEVVKKMKNYWRQLLNAKLITQRKFDNLTKAERGGLSELDKAGFIKRQLVETRQITKHVAQILDSRMNTKYDENDKLIREVKVITLKSKLVSDFRKDFQFYKVREINNYHHAHDAYLNAVVGTALIKKYPKLESEFVYGDYKVYDVRKMIAKSEQEIGKATAKYFFYSNIMNFFKTEITLANGEIRKRPLIETNGETGEIVWDKGRDFATVRKVLSMPQVNIVKKTEVQTGGFSKESILPKRNSDKLIARKKDWDPKKYGGFDSPTVAYSVLVVAKVEKGKSKKLKSVKELLGITIMERSSFEKNPIDFLEAKGYKEVKKDLIIKLPKYSLFELENGRKRMLASAGELQKGNELALPSKYVNFLYLASHYEKLKGSPEDNEQKQLFVEQHKHYLDEIIEQISEFSKRVILADANLDKVLSAYNKHRDKPIREQAENIIHLFTLTNLGAPAAFKYFDTTIDRKRYTSTKEVLDATLIHQSITGLYETRIDLSQLGGDGGEAAAKGGSPAPGGVLNLEEEYRLHEKPVPSSIDPSWLQLFPTVWAERAGMGLANQVPPVVVELRSGASPVAVRQYPMSKEAREGIRPHIQKFLDLGVLVPCRSPWNTPLLPVKKPGTNDYRPVQDLREINKRVQDIHPTVPNPYNLLSSLPPSYTWYSVLDLKDAFFCLRLHPNSQPLFAFEWKDPEKGNTGQLTWTRLPQGFKNSPTLFNEALHRDLAPFRALNPQVVLLQYVDDLLVAAPTYEDCKKGTQKLLQELSKLGYRVSAKKAQLCQREVTYLGYLLKEGKRWLTPARKATVMKIPVPTTPRQVREFLGTAGFCRLWIPGFASLAAPLYPLTKPSIPFIWTEEHQQAFDHIKKALLSAPALALPDLTKPFTLYIDERAGVARGVLTQTLGPWRRPVAYLSKKLDPVASGWPTCLKAVAAVALLLKDADKLTLGQNVTVIASHSLESIVRQPPDRWMTNARMTHYQSLLLNERVSFAPPAVLNPATLLPVESEATPVHRCSEILAEETGTRRDLEDQPLPGVPTWYTDGSSFITEGKRRAGAPIVDGKRTVWASSLPEGTSAQKAELVALTQALRLAEGKNINIYTDSRYAFATAHIHGAIYKQRGWLTSAGKDIKNKEEILALLEAIHLPRRVAIIHCPGHQRGSNPVATGNRRADEAAKQAALSTRVLAGTTKPAGKRTADGSEFEKRTADGSEFESPKKKAKVE

SEQ ID NO: 7215 - protein, 2127 aa, synthetic construct
MPAAKRVKLDGGDKKYSIGLDIGTNSVGWAVITDEYKVPSKKFKVLGNTDRHSIKKNLIGALLFDSGETAEATRLKRTARRRYTRRKNRICYLQEIFSNEMAKVDDSFFHRLEESFLVEEDKKHERHPIFGNIVDEVAYHEKYPTIYHLRKKLVDSTDKADLRLIYLALAHMIKFRGHFLIEGDLNPDNSDVDKLFIQLVQTYNQLFEENPINASGVDAKAILSARLSKSRRLENLIAQLPGEKKNGLFGNLIALSLGLTPNFKSNFDLAEDAKLQLSKDTYDDDLDNLLAQIGDQYADLFLAAKNLSDAILLSDILRVNTEITKAPLSASMIKRYDEHHQDLTLLKALVRQQLPEKYKEIFFDQSKNGYAGYIDGGASQEEFYKFIKPILEKMDGTEELLVKLNREDLLRKQRTFDNGSIPHQIHLGELHAILRRQEDFYPFLKDNREKIEKILTFRIPYYVGPLARGNSRFAWMTRKSEETITPWNFEEVVDKGASAQSFIERMTNFDKNLPNEKVLPKHSLLYEYFTVYNELTKVKYVTEGMRKPAFLSGEQKKAIVDLLFKTNRKVTVKQLKEDYFKKIECFDSVEISGVEDRFNASLGTYHDLLKIIKDKDFLDNEENEDILEDIVLTLTLFEDREMIEERLKTYAHLFDDKVMKQLKRRRYTGWGRLSRKLINGIRDKQSGKTILDFLKSDGFANRNFMQLIHDDSLTFKEDIQKAQVSGQGDSLHEHIANLAGSPAIKKGILQTVKVVDELVKVMGRHKPENIVIEMARENQTTQKGQKNSRERMKRIEEGIKELGSQILKEHPVENTQLQNEKLYLYYLQNGRDMYVDQELDINRLSDYDVDHIVPQSFLKDDSIDNKVLTRSDKARGKSDNVPSEEVVKKMKNYWRQLLNAKLITQRKFDNLTKAERGGLSELDKAGFIKRQLVETRQITKHVAQILDSRMNTKYDENDKLIREVKVITLKSKLVSDFRKDFQFYKVREINNYHHAHDAYLNAVVGTALIKKYPKLESEFVYGDYKVYDVRKMIAKSEQEIGKATAKYFFYSNIMNFFKTEITLANGEIRKRPLIETNGETGEIVWDKGRDFATVRKVLSMPQVNIVKKTEVQTGGFSKESILPKRNSDKLIARKKDWDPKKYGGFDSPTVAYSVLVVAKVEKGKSKKLKSVKELLGITIMERSSFEKNPIDFLEAKGYKEVKKDLIIKLPKYSLFELENGRKRMLASAGELQKGNELALPSKYVNFLYLASHYEKLKGSPEDNEQKQLFVEQHKHYLDEIIEQISEFSKRVILADANLDKVLSAYNKHRDKPIREQAENIIHLFTLTNLGAPAAFKYFDTTIDRKRYTSTKEVLDATLIHQSITGLYETRIDLSQLGGDGGEAAAKGGSPAPGGLLGRDLLTKLKAQIQFSTEGPQVTWEDRPAMCLVLNLEEEYRLHEKPVPPSIDPSWLQLFPMVWAEKAGMGLANQVPPVVVELKSDASPVAVRQYPMSKEAREGIRPHIQRFLDLGILVPCQSPWNTPLLPVKKPGTNDYRPVQDLREVNKRVQDIHPTVPNPYNLLSSLPPSHTWYSVLDLKDAFFCLKLHPNSQPLFAFEWRDPEKGNTGQLTWTRLPQGFKNSPTLFNEALHRDLASFRALNPQVVMLQYVDDLLVAAPTYRDCKEGTRRLLQELSKLGYRVSAKKAQLCREEVTYLGYLLKGGKRWLTPARKATVMKIPTPTTPRQVREFLGTAGFCRLWIPGFASLAAPLYPLTRPKVPFTWTEAHQEAFGRIKEALLSAPALALPDLTKPFALYVDEKEGVARGVLTQTLGPWRRPVAYLSKKLDPVASGWPTCLKAIAAVALLLKDADKLTLGQNVLVIAPHNLESIVRQPPDRWMTNARMTHYQSLLLNERVSFAPPAILNPATLLPVESDDTPIHICSEILAEETGTRPDLRDQPLPGVPAWYTDGSSFIMDGRRQAGAAIVDNKRTVWASNLPEGTSAQKAELIALTQALRLAEGKSINIYTDSRYAFATAHVHGAIYKQRGWLTSAGKDIKNKEEILALLEAIHLPKRVAIIHCPGHQRGTDPVATGNRKADEAAKQAAQSTRILTETTKNAGKRTADGSEFEKRTADGSEFESPKKKAKVE

SEQ ID NO: 7216 - protein, 2127 aa, synthetic construct
MPAAKRVKLDGGDKKYSIGLDIGTNSVGWAVITDEYKVPSKKFKVLGNTDRHSIKKNLIGALLFDSGETAEATRLKRTARRRYTRRKNRICYLQEIFSNEMAKVDDSFFHRLEESFLVEEDKKHERHPIFGNIVDEVAYHEKYPTIYHLRKKLVDSTDKADLRLIYLALAHMIKFRGHFLIEGDLNPDNSDVDKLFIQLVQTYNQLFEENPINASGVDAKAILSARLSKSRRLENLIAQLPGEKKNGLFGNLIALSLGLTPNFKSNFDLAEDAKLQLSKDTYDDDLDNLLAQIGDQYADLFLAAKNLSDAILLSDILRVNTEITKAPLSASMIKRYDEHHQDLTLLKALVRQQLPEKYKEIFFDQSKNGYAGYIDGGASQEEFYKFIKPILEKMDGTEELLVKLNREDLLRKQRTFDNGSIPHQIHLGELHAILRRQEDFYPFLKDNREKIEKILTFRIPYYVGPLARGNSRFAWMTRKSEETITPWNFEEVVDKGASAQSFIERMTNFDKNLPNEKVLPKHSLLYEYFTVYNELTKVKYVTEGMRKPAFLSGEQKKAIVDLLFKTNRKVTVKQLKEDYFKKIECFDSVEISGVEDRFNASLGTYHDLLKIIKDKDFLDNEENEDILEDIVLTLTLFEDREMIEERLKTYAHLFDDKVMKQLKRRRYTGWGRLSRKLINGIRDKQSGKTILDFLKSDGFANRNFMQLIHDDSLTFKEDIQKAQVSGQGDSLHEHIANLAGSPAIKKGILQTVKVVDELVKVMGRHKPENIVIEMARENQTTQKGQKNSRERMKRIEEGIKELGSQILKEHPVENTQLQNEKLYLYYLQNGRDMYVDQELDINRLSDYDVDHIVPQSFLKDDSIDNKVLTRSDKARGKSDNVPSEEVVKKMKNYWRQLLNAKLITQRKFDNLTKAERGGLSELDKAGFIKRQLVETRQITKHVAQILDSRMNTKYDENDKLIREVKVITLKSKLVSDFRKDFQFYKVREINNYHHAHDAYLNAVVGTALIKKYPKLESEFVYGDYKVYDVRKMIAKSEQEIGKATAKYFFYSNIMNFFKTEITLANGEIRKRPLIETNGETGEIVWDKGRDFATVRKVLSMPQVNIVKKTEVQTGGFSKESILPKRNSDKLIARKKDWDPKKYGGFDSPTVAYSVLVVAKVEKGKSKKLKSVKELLGITIMERSSFEKNPIDFLEAKGYKEVKKDLIIKLPKYSLFELENGRKRMLASAGELQKGNELALPSKYVNFLYLASHYEKLKGSPEDNEQKQLFVEQHKHYLDEIIEQISEFSKRVILADANLDKVLSAYNKHRDKPIREQAENIIHLFTLTNLGAPAAFKYFDTTIDRKRYTSTKEVLDATLIHQSITGLYETRIDLSQLGGDGGEAAAKGGSPAPGGLLGRDLLTKLKAQIQFSTEGPQVTWEDRPAMCLVLNLEEEYRLHEKPVPPSIDPSWLQLFPMVWAEKAGMGLANQVPPVVVELKSDASPVAVRQYPMSKEAREGIRPHIQRFLDLGILVPCQSPWNTPLLPVKKPGTNDYRPVQDLREVNKRVQDIHPTVPNPYNLLSSLPPSHTWYSVLDLKDAFFCLKLHPNSQPLFAFEWRDPEKGNTGQLTWTRLPQGFKNSPTLFNEALHRDLASFRALNPQVVMLQYVDDLLVAAPTYRDCKEGTRRLLQELSKLGYRVSAKKAQLCREEVTYLGYLLKGGKRWLTPARKATVMKIPTPTTPRQVREFLGKAGFCRLFIPGFASLAAPLYPLTRPKVPFTWTEAHQEAFGRIKEALLSAPALALPDLTKPFALYVDEKEGVARGVLTQTLGPWRRPVAYLSKKLDPVASGWPTCLKAIAAVALLLKDADKLTLGQNVLVIAPHNLESIVRQPPDRWMTNARMTHYQSLLLNERVSFAPPAILNPATLLPVESDDTPIHICSEILAEETGTRPDLRDQPLPGVPAWYTDGSSFIMDGRRQAGAAIVDNKRTVWASNLPEGTSAQKAELIALTQALRLAEGKSINIYTDSRYAFATAHVHGAIYKQRGWLTSAGKDIKNKEEILALLEAIHLPKRVAIIHCPGHQRGTDPVATGNRKADEAAKQAAQSTRILTETTKNAGKRTADGSEFEKRTADGSEFESPKKKAKVE

SEQ ID NO: 7217 - protein, 2218 aa, synthetic construct
MPAAKRVKLDGGDKKYSIGLDIGTNSVGWAVITDEYKVPSKKFKVLGNTDRHSIKKNLIGALLFDSGETAEATRLKRTARRRYTRRKNRICYLQEIFSNEMAKVDDSFFHRLEESFLVEEDKKHERHPIFGNIVDEVAYHEKYPTIYHLRKKLVDSTDKADLRLIYLALAHMIKFRGHFLIEGDLNPDNSDVDKLFIQLVQTYNQLFEENPINASGVDAKAILSARLSKSRRLENLIAQLPGEKKNGLFGNLIALSLGLTPNFKSNFDLAEDAKLQLSKDTYDDDLDNLLAQIGDQYADLFLAAKNLSDAILLSDILRVNTEITKAPLSASMIKRYDEHHQDLTLLKALVRQQLPEKYKEIFFDQSKNGYAGYIDGGASQEEFYKFIKPILEKMDGTEELLVKLNREDLLRKQRTFDNGSIPHQIHLGELHAILRRQEDFYPFLKDNREKIEKILTFRIPYYVGPLARGNSRFAWMTRKSEETITPWNFEEVVDKGASAQSFIERMTNFDKNLPNEKVLPKHSLLYEYFTVYNELTKVKYVTEGMRKPAFLSGEQKKAIVDLLFKTNRKVTVKQLKEDYFKKIECFDSVEISGVEDRFNASLGTYHDLLKIIKDKDFLDNEENEDILEDIVLTLTLFEDREMIEERLKTYAHLFDDKVMKQLKRRRYTGWGRLSRKLINGIRDKQSGKTILDFLKSDGFANRNFMQLIHDDSLTFKEDIQKAQVSGQGDSLHEHIANLAGSPAIKKGILQTVKVVDELVKVMGRHKPENIVIEMARENQTTQKGQKNSRERMKRIEEGIKELGSQILKEHPVENTQLQNEKLYLYYLQNGRDMYVDQELDINRLSDYDVDHIVPQSFLKDDSIDNKVLTRSDKARGKSDNVPSEEVVKKMKNYWRQLLNAKLITQRKFDNLTKAERGGLSELDKAGFIKRQLVETRQITKHVAQILDSRMNTKYDENDKLIREVKVITLKSKLVSDFRKDFQFYKVREINNYHHAHDAYLNAVVGTALIKKYPKLESEFVYGDYKVYDVRKMIAKSEQEIGKATAKYFFYSNIMNFFKTEITLANGEIRKRPLIETNGETGEIVWDKGRDFATVRKVLSMPQVNIVKKTEVQTGGFSKESILPKRNSDKLIARKKDWDPKKYGGFDSPTVAYSVLVVAKVEKGKSKKLKSVKELLGITIMERSSFEKNPIDFLEAKGYKEVKKDLIIKLPKYSLFELENGRKRMLASAGELQKGNELALPSKYVNFLYLASHYEKLKGSPEDNEQKQLFVEQHKHYLDEIIEQISEFSKRVILADANLDKVLSAYNKHRDKPIREQAENIIHLFTLTNLGAPAAFKYFDTTIDRKRYTSTKEVLDATLIHQSITGLYETRIDLSQLGGDGGEAAAKGGSPAPGGTLGDQGSRGSDPLPEPRVTLTVEGIPTEFLVNTGAEHSVLTKPMGKMGSKRTVVAGATGSKVYPWTTKRLLKIGQKQVTHSFLVIPECPAPLLGRDLLTKLKAQIQFSTEGPQVTWEDRPAMCLVLNLEEEYRLHEKPVPPSIDPSWLQLFPMVWAEKAGMGLANQVPPVVVELKSDASPVAVRQYPMSKEAREGIRPHIQRFLDLGILVPCQSPWNTPLLPVKKPGTNDYRPVQDLREVNKRVQDIHPTVPNPYNLLSSLPPSHTWYSVLDLKDAFFCLKLHPNSQPLFAFEWRDPEKGNTGQLTWTRLPQGFKNSPTLFNEALHRDLASFRALNPQVVMLQYVDDLLVAAPTYRDCKEGTRRLLQELSKLGYRVSAKKAQLCREEVTYLGYLLKGGKRWLTPARKATVMKIPTPTTPRQVREFLGTAGFCRLWIPGFASLAAPLYPLTRPKVPFTWTEAHQEAFGRIKEALLSAPALALPDLTKPFALYVDEKEGVARGVLTQTLGPWRRPVAYLSKKLDPVASGWPTCLKAIAAVALLLKDADKLTLGQNVLVIAPHNLESIVRQPPDRWMTNARMTHYQSLLLNERVSFAPPAILNPATLLPVESDDTPIHICSEILAEETGTRPDLRDQPLPGVPAWYTDGSSFIMDGRRQAGAAIVDNKRTVWASNLPEGTSAQKAELIALTQALRLAEGKSINIYTDSRYAFATAHVHGAIYKQRGWLTSAGKDIKNKEEILALLEAIHLPKRVAIIHCPGHQRGTDPVATGNRKADEAAKQAAQSTRILTETTKNAGKRTADGSEFEKRTADGSEFESPKKKAKVE

SEQ ID NO: 7218 - protein, 2096 aa, synthetic construct
MPAAKRVKLDGGDKKYSIGLDIGTNSVGWAVITDEYKVPSKKFKVLGNTDRHSIKKNLIGALLFDSGETAEATRLKRTARRRYTRRKNRICYLQEIFSNEMAKVDDSFFHRLEESFLVEEDKKHERHPIFGNIVDEVAYHEKYPTIYHLRKKLVDSTDKADLRLIYLALAHMIKFRGHFLIEGDLNPDNSDVDKLFIQLVQTYNQLFEENPINASGVDAKAILSARLSKSRRLENLIAQLPGEKKNGLFGNLIALSLGLTPNFKSNFDLAEDAKLQLSKDTYDDDLDNLLAQIGDQYADLFLAAKNLSDAILLSDILRVNTEITKAPLSASMIKRYDEHHQDLTLLKALVRQQLPEKYKEIFFDQSKNGYAGYIDGGASQEEFYKFIKPILEKMDGTEELLVKLNREDLLRKQRTFDNGSIPHQIHLGELHAILRRQEDFYPFLKDNREKIEKILTFRIPYYVGPLARGNSRFAWMTRKSEETITPWNFEEVVDKGASAQSFIERMTNFDKNLPNEKVLPKHSLLYEYFTVYNELTKVKYVTEGMRKPAFLSGEQKKAIVDLLFKTNRKVTVKQLKEDYFKKIECFDSVEISGVEDRFNASLGTYHDLLKIIKDKDFLDNEENEDILEDIVLTLTLFEDREMIEERLKTYAHLFDDKVMKQLKRRRYTGWGRLSRKLINGIRDKQSGKTILDFLKSDGFANRNFMQLIHDDSLTFKEDIQKAQVSGQGDSLHEHIANLAGSPAIKKGILQTVKVVDELVKVMGRHKPENIVIEMARENQTTQKGQKNSRERMKRIEEGIKELGSQILKEHPVENTQLQNEKLYLYYLQNGRDMYVDQELDINRLSDYDVDHIVPQSFLKDDSIDNKVLTRSDKARGKSDNVPSEEVVKKMKNYWRQLLNAKLITQRKFDNLTKAERGGLSELDKAGFIKRQLVETRQITKHVAQILDSRMNTKYDENDKLIREVKVITLKSKLVSDFRKDFQFYKVREINNYHHAHDAYLNAVVGTALIKKYPKLESEFVYGDYKVYDVRKMIAKSEQEIGKATAKYFFYSNIMNFFKTEITLANGEIRKRPLIETNGETGEIVWDKGRDFATVRKVLSMPQVNIVKKTEVQTGGFSKESILPKRNSDKLIARKKDWDPKKYGGFDSPTVAYSVLVVAKVEKGKSKKLKSVKELLGITIMERSSFEKNPIDFLEAKGYKEVKKDLIIKLPKYSLFELENGRKRMLASAGELQKGNELALPSKYVNFLYLASHYEKLKGSPEDNEQKQLFVEQHKHYLDEIIEQISEFSKRVILADANLDKVLSAYNKHRDKPIREQAENIIHLFTLTNLGAPAAFKYFDTTIDRKRYTSTKEVLDATLIHQSITGLYETRIDLSQLGGDGGEAAAKGGSPAPGGTLNLEDEYRLYETSAEPEVSPGSTWLSDFPQAWAETGGMGLAVRQAPLIIPLKATSTPVSIKQYPMSQEAKLGIKPHIQRLLDQGILVPCQSPWNTPLLPVKKPGTNDYRPVQDLREVNKRVEDIHPTVPNPYNLLSGLPPSHRWYTVLDLKDAFFCLRLHPTSQPLFAFEWRDPGMGISGQLTWTRLPQGFKNSPTLFNEALHRDLADFRIQHPDLILLQYVDDILLAATSELDCQQGTRALLLTLGNLGYRASAKKAQLCQKQVKYLGYLLKEGQRWLTEARKETVMGQPTPKTPRQLREFLGTAGFCRLWIPGFAEMAAPLYPLTKPGTLFNWGPDQQKAYQEIKQALLTAPALGLPDLTKPFELFVDEKQGYAKGVLTQKLGPWRRPVAYLSKKLDPVAAGWPPCLRMVAAIAVLRKDAGKLTMGQPLVILAPHAVEALVKQPPDRWLSNARMTHYQAMLLDTDRVQFGPVVALNPATLLPLPEEGAPHDCLEILAETHGTRPDLTDQPIPDADHTWYTDGSSFLQEGQRKAGAAVTTETEVIWARALPAGTSAQRAELIALTQALKMAEGKRLNVYTDSRYAFATAHIHGEIYRRRGWLTSEGREIKNKSEILALLKALFLPKRLSIIHCLGHQKGDSAEARGNRLADQAAREAAIKTPPDTSTLLAGKRTADGSEFEKRTADGSEFESPKKKAKVE

SEQ ID NO: 7219 - protein, 2096 aa, synthetic construct
MPAAKRVKLDGGDKKYSIGLDIGTNSVGWAVITDEYKVPSKKFKVLGNTDRHSIKKNLIGALLFDSGETAEATRLKRTARRRYTRRKNRICYLQEIFSNEMAKVDDSFFHRLEESFLVEEDKKHERHPIFGNIVDEVAYHEKYPTIYHLRKKLVDSTDKADLRLIYLALAHMIKFRGHFLIEGDLNPDNSDVDKLFIQLVQTYNQLFEENPINASGVDAKAILSARLSKSRRLENLIAQLPGEKKNGLFGNLIALSLGLTPNFKSNFDLAEDAKLQLSKDTYDDDLDNLLAQIGDQYADLFLAAKNLSDAILLSDILRVNTEITKAPLSASMIKRYDEHHQDLTLLKALVRQQLPEKYKEIFFDQSKNGYAGYIDGGASQEEFYKFIKPILEKMDGTEELLVKLNREDLLRKQRTFDNGSIPHQIHLGELHAILRRQEDFYPFLKDNREKIEKILTFRIPYYVGPLARGNSRFAWMTRKSEETITPWNFEEVVDKGASAQSFIERMTNFDKNLPNEKVLPKHSLLYEYFTVYNELTKVKYVTEGMRKPAFLSGEQKKAIVDLLFKTNRKVTVKQLKEDYFKKIECFDSVEISGVEDRFNASLGTYHDLLKIIKDKDFLDNEENEDILEDIVLTLTLFEDREMIEERLKTYAHLFDDKVMKQLKRRRYTGWGRLSRKLINGIRDKQSGKTILDFLKSDGFANRNFMQLIHDDSLTFKEDIQKAQVSGQGDSLHEHIANLAGSPAIKKGILQTVKVVDELVKVMGRHKPENIVIEMARENQTTQKGQKNSRERMKRIEEGIKELGSQILKEHPVENTQLQNEKLYLYYLQNGRDMYVDQELDINRLSDYDVDHIVPQSFLKDDSIDNKVLTRSDKARGKSDNVPSEEVVKKMKNYWRQLLNAKLITQRKFDNLTKAERGGLSELDKAGFIKRQLVETRQITKHVAQILDSRMNTKYDENDKLIREVKVITLKSKLVSDFRKDFQFYKVREINNYHHAHDAYLNAVVGTALIKKYPKLESEFVYGDYKVYDVRKMIAKSEQEIGKATAKYFFYSNIMNFFKTEITLANGEIRKRPLIETNGETGEIVWDKGRDFATVRKVLSMPQVNIVKKTEVQTGGFSKESILPKRNSDKLIARKKDWDPKKYGGFDSPTVAYSVLVVAKVEKGKSKKLKSVKELLGITIMERSSFEKNPIDFLEAKGYKEVKKDLIIKLPKYSLFELENGRKRMLASAGELQKGNELALPSKYVNFLYLASHYEKLKGSPEDNEQKQLFVEQHKHYLDEIIEQISEFSKRVILADANLDKVLSAYNKHRDKPIREQAENIIHLFTLTNLGAPAAFKYFDTTIDRKRYTSTKEVLDATLIHQSITGLYETRIDLSQLGGDGGEAAAKGGSPAPGGTLNLEDEYRLYETSAEPEVSPGSTWLSDFPQAWAETGGMGLAVRQAPLIIPLKATSTPVSIKQYPMSQEAKLGIKPHIQRLLDQGILVPCQSPWNTPLLPVKKPGTNDYRPVQDLREVNKRVEDIHPTVPNPYNLLSGLPPSHRWYTVLDLKDAFFCLRLHPTSQPLFAFEWRDPGMGISGQLTWTRLPQGFKNSPTLFNEALHRDLADFRIQHPDLILLQYVDDILLAATSELDCQQGTRALLLTLGNLGYRASAKKAQLCQKQVKYLGYLLKEGQRWLTEARKETVMGQPTPKTPRQLREFLGKAGFCRLFIPGFAEMAAPLYPLTKPGTLFNWGPDQQKAYQEIKQALLTAPALGLPDLTKPFELFVDEKQGYAKGVLTQKLGPWRRPVAYLSKKLDPVAAGWPPCLRMVAAIAVLRKDAGKLTMGQPLVILAPHAVEALVKQPPDRWLSNARMTHYQAMLLDTDRVQFGPVVALNPATLLPLPEEGAPHDCLEILAETHGTRPDLTDQPIPDADHTWYTDGSSFLQEGQRKAGAAVTTETEVIWARALPAGTSAQRAELIALTQALKMAEGKRLNVYTDSRYAFATAHIHGEIYRRRGWLTSEGREIKNKSEILALLKALFLPKRLSIIHCLGHQKGDSAEARGNRLADQAAREAAIKTPPDTSTLLAGKRTADGSEFEKRTADGSEFESPKKKAKVE

SEQ ID NO: 7220 - protein, 2096 aa, synthetic construct
MPAAKRVKLDGGDKKYSIGLDIGTNSVGWAVITDEYKVPSKKFKVLGNTDRHSIKKNLIGALLFDSGETAEATRLKRTARRRYTRRKNRICYLQEIFSNEMAKVDDSFFHRLEESFLVEEDKKHERHPIFGNIVDEVAYHEKYPTIYHLRKKLVDSTDKADLRLIYLALAHMIKFRGHFLIEGDLNPDNSDVDKLFIQLVQTYNQLFEENPINASGVDAKAILSARLSKSRRLENLIAQLPGEKKNGLFGNLIALSLGLTPNFKSNFDLAEDAKLQLSKDTYDDDLDNLLAQIGDQYADLFLAAKNLSDAILLSDILRVNTEITKAPLSASMIKRYDEHHQDLTLLKALVRQQLPEKYKEIFFDQSKNGYAGYIDGGASQEEFYKFIKPILEKMDGTEELLVKLNREDLLRKQRTFDNGSIPHQIHLGELHAILRRQEDFYPFLKDNREKIEKILTFRIPYYVGPLARGNSRFAWMTRKSEETITPWNFEEVVDKGASAQSFIERMTNFDKNLPNEKVLPKHSLLYEYFTVYNELTKVKYVTEGMRKPAFLSGEQKKAIVDLLFKTNRKVTVKQLKEDYFKKIECFDSVEISGVEDRFNASLGTYHDLLKIIKDKDFLDNEENEDILEDIVLTLTLFEDREMIEERLKTYAHLFDDKVMKQLKRRRYTGWGRLSRKLINGIRDKQSGKTILDFLKSDGFANRNFMQLIHDDSLTFKEDIQKAQVSGQGDSLHEHIANLAGSPAIKKGILQTVKVVDELVKVMGRHKPENIVIEMARENQTTQKGQKNSRERMKRIEEGIKELGSQILKEHPVENTQLQNEKLYLYYLQNGRDMYVDQELDINRLSDYDVDHIVPQSFLKDDSIDNKVLTRSDKARGKSDNVPSEEVVKKMKNYWRQLLNAKLITQRKFDNLTKAERGGLSELDKAGFIKRQLVETRQITKHVAQILDSRMNTKYDENDKLIREVKVITLKSKLVSDFRKDFQFYKVREINNYHHAHDAYLNAVVGTALIKKYPKLESEFVYGDYKVYDVRKMIAKSEQEIGKATAKYFFYSNIMNFFKTEITLANGEIRKRPLIETNGETGEIVWDKGRDFATVRKVLSMPQVNIVKKTEVQTGGFSKESILPKRNSDKLIARKKDWDPKKYGGFDSPTVAYSVLVVAKVEKGKSKKLKSVKELLGITIMERSSFEKNPIDFLEAKGYKEVKKDLIIKLPKYSLFELENGRKRMLASAGELQKGNELALPSKYVNFLYLASHYEKLKGSPEDNEQKQLFVEQHKHYLDEIIEQISEFSKRVILADANLDKVLSAYNKHRDKPIREQAENIIHLFTLTNLGAPAAFKYFDTTIDRKRYTSTKEVLDATLIHQSITGLYETRIDLSQLGGDGGEAAAKGGSPAPGGTLGIEDEYRLHETSTEPDVSLGSTWLSDFPQAWAETGGMGLAVRQAPLIIPLKATSTPVSIQQYPMSHEARLGIKPHIQRLLDQGILVPCQSPWNTPLLPVKKPGTNDYRPVQDLREVNKRVEDIHPTVPNPYNLLSGLPPSHQWYTVLDLKDAFFCLRLHPTSQPLFAFEWRDPGMGISGQLTWTRLPQGFKNSPTLFNEALHRDLADFRIQHPDLILLQYVDDILLAATSELDCQQGTRALLQTLGDLGYRASAKKAQICQKQVKYLGYLLREGQRWLTEARKETVMGQPVPKTPRQLREFLGTAGFCRLWIPGFAEMAAPLYPLTKPGTLFSWGPDQQKAYQEIKQALLTAPALGLPDLTKPFELFVDEKQGYAKGVLTQKLGPWRRPVAYLSKKLDPVAAGWPPCLRMVAAIAVLTKDAGKLTMGQPLVILAPHAVEALVKQPPDRWLSNARMTHYQAMLLDTDRVQFGPVVALNPATLLPLPEEGAPHDCLEILAETHGTRPDLTDQPIPDADHTWYTDGSSFLQEGQRKAGAAVTTETEVIWAGALPAGTSAQRAELIALTQALKMAEGKRLNVYTDSRYAFATAHIHGEIYRRRGWLTSEGREIKNKSEILALLKALFLPKRLSIIHCLGHQKGDSAEARGNRLADQAAREAAIKTPPDTSTLLAGKRTADGSEFEKRTADGSEFESPKKKAKVE

SEQ ID NO: 7221 - protein, 2096 aa, synthetic construct
MPAAKRVKLDGGDKKYSIGLDIGTNSVGWAVITDEYKVPSKKFKVLGNTDRHSIKKNLIGALLFDSGETAEATRLKRTARRRYTRRKNRICYLQEIFSNEMAKVDDSFFHRLEESFLVEEDKKHERHPIFGNIVDEVAYHEKYPTIYHLRKKLVDSTDKADLRLIYLALAHMIKFRGHFLIEGDLNPDNSDVDKLFIQLVQTYNQLFEENPINASGVDAKAILSARLSKSRRLENLIAQLPGEKKNGLFGNLIALSLGLTPNFKSNFDLAEDAKLQLSKDTYDDDLDNLLAQIGDQYADLFLAAKNLSDAILLSDILRVNTEITKAPLSASMIKRYDEHHQDLTLLKALVRQQLPEKYKEIFFDQSKNGYAGYIDGGASQEEFYKFIKPILEKMDGTEELLVKLNREDLLRKQRTFDNGSIPHQIHLGELHAILRRQEDFYPFLKDNREKIEKILTFRIPYYVGPLARGNSRFAWMTRKSEETITPWNFEEVVDKGASAQSFIERMTNFDKNLPNEKVLPKHSLLYEYFTVYNELTKVKYVTEGMRKPAFLSGEQKKAIVDLLFKTNRKVTVKQLKEDYFKKIECFDSVEISGVEDRFNASLGTYHDLLKIIKDKDFLDNEENEDILEDIVLTLTLFEDREMIEERLKTYAHLFDDKVMKQLKRRRYTGWGRLSRKLINGIRDKQSGKTILDFLKSDGFANRNFMQLIHDDSLTFKEDIQKAQVSGQGDSLHEHIANLAGSPAIKKGILQTVKVVDELVKVMGRHKPENIVIEMARENQTTQKGQKNSRERMKRIEEGIKELGSQILKEHPVENTQLQNEKLYLYYLQNGRDMYVDQELDINRLSDYDVDHIVPQSFLKDDSIDNKVLTRSDKARGKSDNVPSEEVVKKMKNYWRQLLNAKLITQRKFDNLTKAERGGLSELDKAGFIKRQLVETRQITKHVAQILDSRMNTKYDENDKLIREVKVITLKSKLVSDFRKDFQFYKVREINNYHHAHDAYLNAVVGTALIKKYPKLESEFVYGDYKVYDVRKMIAKSEQEIGKATAKYFFYSNIMNFFKTEITLANGEIRKRPLIETNGETGEIVWDKGRDFATVRKVLSMPQVNIVKKTEVQTGGFSKESILPKRNSDKLIARKKDWDPKKYGGFDSPTVAYSVLVVAKVEKGKSKKLKSVKELLGITIMERSSFEKNPIDFLEAKGYKEVKKDLIIKLPKYSLFELENGRKRMLASAGELQKGNELALPSKYVNFLYLASHYEKLKGSPEDNEQKQLFVEQHKHYLDEIIEQISEFSKRVILADANLDKVLSAYNKHRDKPIREQAENIIHLFTLTNLGAPAAFKYFDTTIDRKRYTSTKEVLDATLIHQSITGLYETRIDLSQLGGDGGEAAAKGGSPAPGGTLNIEDEYRLHETSKGPDVPLGSTWLSDFPQAWAETGGMGLAVRQAPLIIPLKATSTPVSIKQYPMSQEARLGIKPHIQRLLDQGILVPCQSPWNTPLLPVKKPGTNDYRPVQDLREVNKRVEDIHPTVPNPYNLLSGLPPSHQWYTVLDLKDAFFCLRLHPTSQSLFAFEWRDPEMGISGQLTWTRLPQGFKNSPTLFDEALHRDLADFRIQHPDLILLQYVDDLLLAATSELDCQQGTRALLQTLGDLGYRASAKKAQICQKQVKYLGYLLKEGQRWLTEARKETVMGQPTPKTPRQLREFLGTAGFCRLWIPGFAEMAAPLYPLTKTGTLFEWGPDQQKAYQEIKQALLTAPALGLPDLTKPFELFVDEKQGYAKGVLTQKLGPWRRPVAYLSKKLDPVAAGWPPCLRMVAAIAVLTKDAGKLTMGQPLVILAPHAVEALVKQPPDRWLSNARMTHYQALLLDTDRVQFGPIVALNPATLLPLPEEGLQHDCLDILAEAHGTRPDLTDQPLPDADHTWYTDGSSFLQEGQRKAGAAVTTETEVVWAKALPAGTSAQRAELIALTQALKMAEGKKLNVYTDSRYAFATAHIHGEIYRRRGLLTSEGKEIKNKDEILALLKALFLPKRLSIIHCPGHQKGNRAEARGNRMADQAAREVATRETPETSTLLAGKRTADGSEFEKRTADGSEFESPKKKAKVE

SEQ ID NO: 7222 - protein, 2096 aa, synthetic construct
MPAAKRVKLDGGDKKYSIGLDIGTNSVGWAVITDEYKVPSKKFKVLGNTDRHSIKKNLIGALLFDSGETAEATRLKRTARRRYTRRKNRICYLQEIFSNEMAKVDDSFFHRLEESFLVEEDKKHERHPIFGNIVDEVAYHEKYPTIYHLRKKLVDSTDKADLRLIYLALAHMIKFRGHFLIEGDLNPDNSDVDKLFIQLVQTYNQLFEENPINASGVDAKAILSARLSKSRRLENLIAQLPGEKKNGLFGNLIALSLGLTPNFKSNFDLAEDAKLQLSKDTYDDDLDNLLAQIGDQYADLFLAAKNLSDAILLSDILRVNTEITKAPLSASMIKRYDEHHQDLTLLKALVRQQLPEKYKEIFFDQSKNGYAGYIDGGASQEEFYKFIKPILEKMDGTEELLVKLNREDLLRKQRTFDNGSIPHQIHLGELHAILRRQEDFYPFLKDNREKIEKILTFRIPYYVGPLARGNSRFAWMTRKSEETITPWNFEEVVDKGASAQSFIERMTNFDKNLPNEKVLPKHSLLYEYFTVYNELTKVKYVTEGMRKPAFLSGEQKKAIVDLLFKTNRKVTVKQLKEDYFKKIECFDSVEISGVEDRFNASLGTYHDLLKIIKDKDFLDNEENEDILEDIVLTLTLFEDREMIEERLKTYAHLFDDKVMKQLKRRRYTGWGRLSRKLINGIRDKQSGKTILDFLKSDGFANRNFMQLIHDDSLTFKEDIQKAQVSGQGDSLHEHIANLAGSPAIKKGILQTVKVVDELVKVMGRHKPENIVIEMARENQTTQKGQKNSRERMKRIEEGIKELGSQILKEHPVENTQLQNEKLYLYYLQNGRDMYVDQELDINRLSDYDVDHIVPQSFLKDDSIDNKVLTRSDKARGKSDNVPSEEVVKKMKNYWRQLLNAKLITQRKFDNLTKAERGGLSELDKAGFIKRQLVETRQITKHVAQILDSRMNTKYDENDKLIREVKVITLKSKLVSDFRKDFQFYKVREINNYHHAHDAYLNAVVGTALIKKYPKLESEFVYGDYKVYDVRKMIAKSEQEIGKATAKYFFYSNIMNFFKTEITLANGEIRKRPLIETNGETGEIVWDKGRDFATVRKVLSMPQVNIVKKTEVQTGGFSKESILPKRNSDKLIARKKDWDPKKYGGFDSPTVAYSVLVVAKVEKGKSKKLKSVKELLGITIMERSSFEKNPIDFLEAKGYKEVKKDLIIKLPKYSLFELENGRKRMLASAGELQKGNELALPSKYVNFLYLASHYEKLKGSPEDNEQKQLFVEQHKHYLDEIIEQISEFSKRVILADANLDKVLSAYNKHRDKPIREQAENIIHLFTLTNLGAPAAFKYFDTTIDRKRYTSTKEVLDATLIHQSITGLYETRIDLSQLGGDGGEAAAKGGSPAPGGTLNIEDEYRLHETSKGPDVPLGSTWLSDFPQAWAETGGMGLAVRQAPLIIPLKATSTPVSIKQYPMSQEARLGIKPHIQRLLDQGILVPCQSPWNTPLLPVKKPGTNDYRPVQDLREVNKRVEDIHPTVPNPYNLLSGLPPSHQWYTVLDLKDAFFCLRLHPTSQSLFAFEWRDPEMGISGQLTWTRLPQGFKNSPTLFNEALHRDLADFRIQHPDLILLQYVDDLLLAATSELDCQQGTRALLQTLGDLGYRASAKKAQICQKQVKYLGYLLKEGQRWLTEARKETVMGQPTPKTPRQLREFLGKAGFCRLFIPGFAEMAAPLYPLTKPGTLFEWGPDQQKAYQEIKQALLTAPALGLPDLTKPFELFVDEKQGYAKGVLTQKLGPWRRPVAYLSKKLDPVAAGWPPCLRMVAAIAVLTKDAGKLTMGQPLVILAPHAVEALVKQPPDRWLSNARMTHYQALLLDTDRVQFGPIVALNPATLLPLPEEGLQHDCLDILAEAHGTRPDLTDQPLPDADHTWYTDGSSFLQEGQRKAGAAVTTETEVVWAKALPAGTSAQRAELIALTQALKMAEGKKLNVYTDSRYAFATAHIHGEIYRRRGWLTSEGKEIKNKDEILALLKALFLPKRLSIIHCPGHQKGNRAEARGNRMADQAAREVATRETPETSTLLAGKRTADGSEFEKRTADGSEFESPKKKAKVE

SEQ ID NO: 7223 - protein, 2087 aa, synthetic construct
MPAAKRVKLDGGDKKYSIGLDIGTNSVGWAVITDEYKVPSKKFKVLGNTDRHSIKKNLIGALLFDSGETAEATRLKRTARRRYTRRKNRICYLQEIFSNEMAKVDDSFFHRLEESFLVEEDKKHERHPIFGNIVDEVAYHEKYPTIYHLRKKLVDSTDKADLRLIYLALAHMIKFRGHFLIEGDLNPDNSDVDKLFIQLVQTYNQLFEENPINASGVDAKAILSARLSKSRRLENLIAQLPGEKKNGLFGNLIALSLGLTPNFKSNFDLAEDAKLQLSKDTYDDDLDNLLAQIGDQYADLFLAAKNLSDAILLSDILRVNTEITKAPLSASMIKRYDEHHQDLTLLKALVRQQLPEKYKEIFFDQSKNGYAGYIDGGASQEEFYKFIKPILEKMDGTEELLVKLNREDLLRKQRTFDNGSIPHQIHLGELHAILRRQEDFYPFLKDNREKIEKILTFRIPYYVGPLARGNSRFAWMTRKSEETITPWNFEEVVDKGASAQSFIERMTNFDKNLPNEKVLPKHSLLYEYFTVYNELTKVKYVTEGMRKPAFLSGEQKKAIVDLLFKTNRKVTVKQLKEDYFKKIECFDSVEISGVEDRFNASLGTYHDLLKIIKDKDFLDNEENEDILEDIVLTLTLFEDREMIEERLKTYAHLFDDKVMKQLKRRRYTGWGRLSRKLINGIRDKQSGKTILDFLKSDGFANRNFMQLIHDDSLTFKEDIQKAQVSGQGDSLHEHIANLAGSPAIKKGILQTVKVVDELVKVMGRHKPENIVIEMARENQTTQKGQKNSRERMKRIEEGIKELGSQILKEHPVENTQLQNEKLYLYYLQNGRDMYVDQELDINRLSDYDVDHIVPQSFLKDDSIDNKVLTRSDKARGKSDNVPSEEVVKKMKNYWRQLLNAKLITQRKFDNLTKAERGGLSELDKAGFIKRQLVETRQITKHVAQILDSRMNTKYDENDKLIREVKVITLKSKLVSDFRKDFQFYKVREINNYHHAHDAYLNAVVGTALIKKYPKLESEFVYGDYKVYDVRKMIAKSEQEIGKATAKYFFYSNIMNFFKTEITLANGEIRKRPLIETNGETGEIVWDKGRDFATVRKVLSMPQVNIVKKTEVQTGGFSKESILPKRNSDKLIARKKDWDPKKYGGFDSPTVAYSVLVVAKVEKGKSKKLKSVKELLGITIMERSSFEKNPIDFLEAKGYKEVKKDLIIKLPKYSLFELENGRKRMLASAGELQKGNELALPSKYVNFLYLASHYEKLKGSPEDNEQKQLFVEQHKHYLDEIIEQISEFSKRVILADANLDKVLSAYNKHRDKPIREQAENIIHLFTLTNLGAPAAFKYFDTTIDRKRYTSTKEVLDATLIHQSITGLYETRIDLSQLGGDGGEAAAKGGSPAPGGIPWLMKKPLQLTTLVPLQEYEERLLKQTMLTGSYKEKLQSLFLKYDALWQHWENQVGHRRIKPHHIATGTVNPRPQKQYPINPKAKASIQTVINDLLKQGVLIQQNSIMNTPVYPVPKPDGKWRMVLDYREVNKTIPLIAAQNQHSAGILSSIFRGKYKTTLDLSNGFWAHSITPESYWLTAFTWLGQQYCWTRLPQGFLNSPALFTADVVDLLKEVPNVQVYVDDIYISHDDPREHLEQLEKVFSLLLNAGYVVSLKKSEIAQHEVEFLGFNITKEGRGLTETFKQKLLNITPPRDLKQLQSILGLLNFARNFIPNFSELVKPLYNIIATANGKYITWTTDNSQQLQNIISMLNSAENLEERNPEVRLIMKVNTSPSAGYIRFYNEFAKRPIMYLNYVYTKAEVKFTNTEKLLTTIHKGLIKALDLGMGQEILVYSPIVSMTKIQKTPLPERKALPIRWITWMSYLEDPRIQFHYDKTLPELQQVPTVTDDIIAKIKHPSEFSMVFYTDGSAIKHPNVNKSHNAGMGIAQVQFKPEFTVINTWSIPLGDHTAQLAEVAAVEFACKKALKIDGPVLIVTDSFYVAESVNKELPYWQSNGFFNNKKKPLKHVSKWKSIADCIQLKPDIIIIHEKGHQPTASTFHTEGNNLADKLATQGSYVVNAGKRTADGSEFEKRTADGSEFESPKKKAKVE

SEQ ID NO: 7224 - protein, 2087 aa, synthetic construct
MPAAKRVKLDGGDKKYSIGLDIGTNSVGWAVITDEYKVPSKKFKVLGNTDRHSIKKNLIGALLFDSGETAEATRLKRTARRRYTRRKNRICYLQEIFSNEMAKVDDSFFHRLEESFLVEEDKKHERHPIFGNIVDEVAYHEKYPTIYHLRKKLVDSTDKADLRLIYLALAHMIKFRGHFLIEGDLNPDNSDVDKLFIQLVQTYNQLFEENPINASGVDAKAILSARLSKSRRLENLIAQLPGEKKNGLFGNLIALSLGLTPNFKSNFDLAEDAKLQLSKDTYDDDLDNLLAQIGDQYADLFLAAKNLSDAILLSDILRVNTEITKAPLSASMIKRYDEHHQDLTLLKALVRQQLPEKYKEIFFDQSKNGYAGYIDGGASQEEFYKFIKPILEKMDGTEELLVKLNREDLLRKQRTFDNGSIPHQIHLGELHAILRRQEDFYPFLKDNREKIEKILTFRIPYYVGPLARGNSRFAWMTRKSEETITPWNFEEVVDKGASAQSFIERMTNFDKNLPNEKVLPKHSLLYEYFTVYNELTKVKYVTEGMRKPAFLSGEQKKAIVDLLFKTNRKVTVKQLKEDYFKKIECFDSVEISGVEDRFNASLGTYHDLLKIIKDKDFLDNEENEDILEDIVLTLTLFEDREMIEERLKTYAHLFDDKVMKQLKRRRYTGWGRLSRKLINGIRDKQSGKTILDFLKSDGFANRNFMQLIHDDSLTFKEDIQKAQVSGQGDSLHEHIANLAGSPAIKKGILQTVKVVDELVKVMGRHKPENIVIEMARENQTTQKGQKNSRERMKRIEEGIKELGSQILKEHPVENTQLQNEKLYLYYLQNGRDMYVDQELDINRLSDYDVDHIVPQSFLKDDSIDNKVLTRSDKARGKSDNVPSEEVVKKMKNYWRQLLNAKLITQRKFDNLTKAERGGLSELDKAGFIKRQLVETRQITKHVAQILDSRMNTKYDENDKLIREVKVITLKSKLVSDFRKDFQFYKVREINNYHHAHDAYLNAVVGTALIKKYPKLESEFVYGDYKVYDVRKMIAKSEQEIGKATAKYFFYSNIMNFFKTEITLANGEIRKRPLIETNGETGEIVWDKGRDFATVRKVLSMPQVNIVKKTEVQTGGFSKESILPKRNSDKLIARKKDWDPKKYGGFDSPTVAYSVLVVAKVEKGKSKKLKSVKELLGITIMERSSFEKNPIDFLEAKGYKEVKKDLIIKLPKYSLFELENGRKRMLASAGELQKGNELALPSKYVNFLYLASHYEKLKGSPEDNEQKQLFVEQHKHYLDEIIEQISEFSKRVILADANLDKVLSAYNKHRDKPIREQAENIIHLFTLTNLGAPAAFKYFDTTIDRKRYTSTKEVLDATLIHQSITGLYETRIDLSQLGGDGGEAAAKGGSPAPGGIPWLMKKPLQLTTLVPLQEYEERLLKQTMLTGSYKEKLQSLFLKYDALWQHWENQVGHRRIKPHHIATGTVNPRPQKQYPINPKAKASIQTVINDLLKQGVLIQQNSIMNTPVYPVPKPDGKWRMVLDYREVNKTIPLIAAQNQHSAGILSSIFRGKYKTTLDLSNGFWAHSITPESYWLTAFTWLGQQYCWTRLPQGFLNSPALFNADVVDLLKEVPNVQVYVDDIYISHDDPREHLEQLEKVFSLLLNAGYVVSLKKSEIAQHEVEFLGFNITKEGRGLTETFKQKLLNITPPRDLKQLQSILGLLNFARNFIPNFSELVKPLYNIIATAPGKYITWTTDNSQQLQNIISMLNSAENLEERNPEVRLIMKVNTSPSAGYIRFYNEFAKRPIMYLNYVYTKAEVKFTNTEKLLTTIHKGLIKALDLGMGQEILVYSPIVSMTKIQKTPLPERKALPIRWITWMSYLEDPRIQFHYDKTLPELQQVPTVTDDIIAKIKHPSEFSMVFYTDGSAIKHPNVNKSHNAGMGIAQVQFKPEFTVINTWSIPLGDHTAQLAEVAAVEFACKKALKIDGPVLIVTDSFYVAESVNKELPYWQSNGFFNNKKKPLKHVSKWKSIADCIQLKPDIIIIHEKGHQPTASTFHTEGNNLADKLATQGSYVVNAGKRTADGSEFEKRTADGSEFESPKKKAKVE

SEQ ID NO: 7225 - protein, 2094 aa, synthetic construct
MPAAKRVKLDGGDKKYSIGLDIGTNSVGWAVITDEYKVPSKKFKVLGNTDRHSIKKNLIGALLFDSGETAEATRLKRTARRRYTRRKNRICYLQEIFSNEMAKVDDSFFHRLEESFLVEEDKKHERHPIFGNIVDEVAYHEKYPTIYHLRKKLVDSTDKADLRLIYLALAHMIKFRGHFLIEGDLNPDNSDVDKLFIQLVQTYNQLFEENPINASGVDAKAILSARLSKSRRLENLIAQLPGEKKNGLFGNLIALSLGLTPNFKSNFDLAEDAKLQLSKDTYDDDLDNLLAQIGDQYADLFLAAKNLSDAILLSDILRVNTEITKAPLSASMIKRYDEHHQDLTLLKALVRQQLPEKYKEIFFDQSKNGYAGYIDGGASQEEFYKFIKPILEKMDGTEELLVKLNREDLLRKQRTFDNGSIPHQIHLGELHAILRRQEDFYPFLKDNREKIEKILTFRIPYYVGPLARGNSRFAWMTRKSEETITPWNFEEVVDKGASAQSFIERMTNFDKNLPNEKVLPKHSLLYEYFTVYNELTKVKYVTEGMRKPAFLSGEQKKAIVDLLFKTNRKVTVKQLKEDYFKKIECFDSVEISGVEDRFNASLGTYHDLLKIIKDKDFLDNEENEDILEDIVLTLTLFEDREMIEERLKTYAHLFDDKVMKQLKRRRYTGWGRLSRKLINGIRDKQSGKTILDFLKSDGFANRNFMQLIHDDSLTFKEDIQKAQVSGQGDSLHEHIANLAGSPAIKKGILQTVKVVDELVKVMGRHKPENIVIEMARENQTTQKGQKNSRERMKRIEEGIKELGSQILKEHPVENTQLQNEKLYLYYLQNGRDMYVDQELDINRLSDYDVDHIVPQSFLKDDSIDNKVLTRSDKARGKSDNVPSEEVVKKMKNYWRQLLNAKLITQRKFDNLTKAERGGLSELDKAGFIKRQLVETRQITKHVAQILDSRMNTKYDENDKLIREVKVITLKSKLVSDFRKDFQFYKVREINNYHHAHDAYLNAVVGTALIKKYPKLESEFVYGDYKVYDVRKMIAKSEQEIGKATAKYFFYSNIMNFFKTEITLANGEIRKRPLIETNGETGEIVWDKGRDFATVRKVLSMPQVNIVKKTEVQTGGFSKESILPKRNSDKLIARKKDWDPKKYGGFDSPTVAYSVLVVAKVEKGKSKKLKSVKELLGITIMERSSFEKNPIDFLEAKGYKEVKKDLIIKLPKYSLFELENGRKRMLASAGELQKGNELALPSKYVNFLYLASHYEKLKGSPEDNEQKQLFVEQHKHYLDEIIEQISEFSKRVILADANLDKVLSAYNKHRDKPIREQAENIIHLFTLTNLGAPAAFKYFDTTIDRKRYTSTKEVLDATLIHQSITGLYETRIDLSQLGGDGGEAAAKGGSPAPGGVLNLEEEYRLHEKPVPSSIDPSWLQLFPTVWAERAGMGLANQVPPVVVELRSGASPVAVRQYPMSKEAREGIRPHIQRFLDLGVLVPCQSPWNTPLLPVKKPGTNDYRPVQDLREINKRVQDIHPTVPNPYNLLSSLPPSHTWYSVLDLKDAFFCLKLHPNSQPLFAFEWRDPEKGNTGQLTWTRLPQGFKNSPTLFDEALHRDLAPFRALNPQVVLLQYVDDLLVAAPTYRDCKEGTQKLLQELSKLGYRVSAKKAQLCQKEVTYLGYLLKEGKRWLTPARKATVMKIPPPTTPRQVREFLGTAGFCRLWIPGFASLAAPLYPLTKESIPFIWTEEHQKAFDRIKEALLSAPALALPDLTKPFTLYVDERAGVARGVLTQTLGPWRRPVAYLSKKLDPVASGWPTCLKAVAAVALLLKDADKLTLGQNVTVIASHSLESIVRQPPDRWMTNARMTHYQSLLLNERVSFAPPAVLNPATLLPVESEATPVHRCSEILAEETGTRRDLKDQPLPGVPAWYTDGSSFIAEGKRRAGAAIVDGKRTVWASSLPEGTSAQKAELVALTQALRLAEGKDINIYTDSRYAFATAHIHGAIYKQRGLLTSAGKDIKNKEEILALLEAIHLPKRVAIIHCPGHQKGNDPVATGNRRADEAAKQAALSTRVLAETTKPAGKRTADGSEFEKRTADGSEFESPKKKAKVE

SEQ ID NO: 7226 - protein, 2094 aa, synthetic construct
MPAAKRVKLDGGDKKYSIGLDIGTNSVGWAVITDEYKVPSKKFKVLGNTDRHSIKKNLIGALLFDSGETAEATRLKRTARRRYTRRKNRICYLQEIFSNEMAKVDDSFFHRLEESFLVEEDKKHERHPIFGNIVDEVAYHEKYPTIYHLRKKLVDSTDKADLRLIYLALAHMIKFRGHFLIEGDLNPDNSDVDKLFIQLVQTYNQLFEENPINASGVDAKAILSARLSKSRRLENLIAQLPGEKKNGLFGNLIALSLGLTPNFKSNFDLAEDAKLQLSKDTYDDDLDNLLAQIGDQYADLFLAAKNLSDAILLSDILRVNTEITKAPLSASMIKRYDEHHQDLTLLKALVRQQLPEKYKEIFFDQSKNGYAGYIDGGASQEEFYKFIKPILEKMDGTEELLVKLNREDLLRKQRTFDNGSIPHQIHLGELHAILRRQEDFYPFLKDNREKIEKILTFRIPYYVGPLARGNSRFAWMTRKSEETITPWNFEEVVDKGASAQSFIERMTNFDKNLPNEKVLPKHSLLYEYFTVYNELTKVKYVTEGMRKPAFLSGEQKKAIVDLLFKTNRKVTVKQLKEDYFKKIECFDSVEISGVEDRFNASLGTYHDLLKIIKDKDFLDNEENEDILEDIVLTLTLFEDREMIEERLKTYAHLFDDKVMKQLKRRRYTGWGRLSRKLINGIRDKQSGKTILDFLKSDGFANRNFMQLIHDDSLTFKEDIQKAQVSGQGDSLHEHIANLAGSPAIKKGILQTVKVVDELVKVMGRHKPENIVIEMARENQTTQKGQKNSRERMKRIEEGIKELGSQILKEHPVENTQLQNEKLYLYYLQNGRDMYVDQELDINRLSDYDVDHIVPQSFLKDDSIDNKVLTRSDKARGKSDNVPSEEVVKKMKNYWRQLLNAKLITQRKFDNLTKAERGGLSELDKAGFIKRQLVETRQITKHVAQILDSRMNTKYDENDKLIREVKVITLKSKLVSDFRKDFQFYKVREINNYHHAHDAYLNAVVGTALIKKYPKLESEFVYGDYKVYDVRKMIAKSEQEIGKATAKYFFYSNIMNFFKTEITLANGEIRKRPLIETNGETGEIVWDKGRDFATVRKVLSMPQVNIVKKTEVQTGGFSKESILPKRNSDKLIARKKDWDPKKYGGFDSPTVAYSVLVVAKVEKGKSKKLKSVKELLGITIMERSSFEKNPIDFLEAKGYKEVKKDLIIKLPKYSLFELENGRKRMLASAGELQKGNELALPSKYVNFLYLASHYEKLKGSPEDNEQKQLFVEQHKHYLDEIIEQISEFSKRVILADANLDKVLSAYNKHRDKPIREQAENIIHLFTLTNLGAPAAFKYFDTTIDRKRYTSTKEVLDATLIHQSITGLYETRIDLSQLGGDGGEAAAKGGSPAPGGVLNLEEEYRLHEKPVPSSIDPSWLQLFPTVWAERAGMGLANQVPPVVVELRSGASPVAVRQYPMSKEAREGIRPHIQRFLDLGVLVPCQSPWNTPLLPVKKPGTNDYRPVQDLREINKRVQDIHPTVPNPYNLLSSLPPSHTWYSVLDLKDAFFCLKLHPNSQPLFAFEWRDPEKGNTGQLTWTRLPQGFKNSPTLFNEALHRDLAPFRALNPQVVLLQYVDDLLVAAPTYRDCKEGTQKLLQELSKLGYRVSAKKAQLCQKEVTYLGYLLKEGKRWLTPARKATVMKIPPPTTPRQVREFLGKAGFCRLFIPGFASLAAPLYPLTKPSIPFIWTEEHQKAFDRIKEALLSAPALALPDLTKPFTLYVDERAGVARGVLTQTLGPWRRPVAYLSKKLDPVASGWPTCLKAVAAVALLLKDADKLTLGQNVTVIASHSLESIVRQPPDRWMTNARMTHYQSLLLNERVSFAPPAVLNPATLLPVESEATPVHRCSEILAEETGTRRDLKDQPLPGVPAWYTDGSSFIAEGKRRAGAAIVDGKRTVWASSLPEGTSAQKAELVALTQALRLAEGKDINIYTDSRYAFATAHIHGAIYKQRGWLTSAGKDIKNKEEILALLEAIHLPKRVAIIHCPGHQKGNDPVATGNRRADEAAKQAALSTRVLAETTKPAGKRTADGSEFEKRTADGSEFESPKKKAKVE

SEQ ID NO: 7227 - protein, 2096 aa, synthetic construct
MPAAKRVKLDGGDKKYSIGLDIGTNSVGWAVITDEYKVPSKKFKVLGNTDRHSIKKNLIGALLFDSGETAEATRLKRTARRRYTRRKNRICYLQEIFSNEMAKVDDSFFHRLEESFLVEEDKKHERHPIFGNIVDEVAYHEKYPTIYHLRKKLVDSTDKADLRLIYLALAHMIKFRGHFLIEGDLNPDNSDVDKLFIQLVQTYNQLFEENPINASGVDAKAILSARLSKSRRLENLIAQLPGEKKNGLFGNLIALSLGLTPNFKSNFDLAEDAKLQLSKDTYDDDLDNLLAQIGDQYADLFLAAKNLSDAILLSDILRVNTEITKAPLSASMIKRYDEHHQDLTLLKALVRQQLPEKYKEIFFDQSKNGYAGYIDGGASQEEFYKFIKPILEKMDGTEELLVKLNREDLLRKQRTFDNGSIPHQIHLGELHAILRRQEDFYPFLKDNREKIEKILTFRIPYYVGPLARGNSRFAWMTRKSEETITPWNFEEVVDKGASAQSFIERMTNFDKNLPNEKVLPKHSLLYEYFTVYNELTKVKYVTEGMRKPAFLSGEQKKAIVDLLFKTNRKVTVKQLKEDYFKKIECFDSVEISGVEDRFNASLGTYHDLLKIIKDKDFLDNEENEDILEDIVLTLTLFEDREMIEERLKTYAHLFDDKVMKQLKRRRYTGWGRLSRKLINGIRDKQSGKTILDFLKSDGFANRNFMQLIHDDSLTFKEDIQKAQVSGQGDSLHEHIANLAGSPAIKKGILQTVKVVDELVKVMGRHKPENIVIEMARENQTTQKGQKNSRERMKRIEEGIKELGSQILKEHPVENTQLQNEKLYLYYLQNGRDMYVDQELDINRLSDYDVDHIVPQSFLKDDSIDNKVLTRSDKARGKSDNVPSEEVVKKMKNYWRQLLNAKLITQRKFDNLTKAERGGLSELDKAGFIKRQLVETRQITKHVAQILDSRMNTKYDENDKLIREVKVITLKSKLVSDFRKDFQFYKVREINNYHHAHDAYLNAVVGTALIKKYPKLESEFVYGDYKVYDVRKMIAKSEQEIGKATAKYFFYSNIMNFFKTEITLANGEIRKRPLIETNGETGEIVWDKGRDFATVRKVLSMPQVNIVKKTEVQTGGFSKESILPKRNSDKLIARKKDWDPKKYGGFDSPTVAYSVLVVAKVEKGKSKKLKSVKELLGITIMERSSFEKNPIDFLEAKGYKEVKKDLIIKLPKYSLFELENGRKRMLASAGELQKGNELALPSKYVNFLYLASHYEKLKGSPEDNEQKQLFVEQHKHYLDEIIEQISEFSKRVILADANLDKVLSAYNKHRDKPIREQAENIIHLFTLTNLGAPAAFKYFDTTIDRKRYTSTKEVLDATLIHQSITGLYETRIDLSQLGGDGGEAAAKGGSPAPGGTLNIEDEYRLHETSKEPDVPLGSTWLSDFPQAWAETGGMGLAVRQAPLIIPLKATSTPVSIKQYPMSQEARLGIKPHIQRLLDQGILVPCQSPWNTPLLPVKKPGTNDYRPVQDLREVNKRVEDIHPTVPNPYNLLSGLPPSHQWYTVLDLKDAFFCLRLHPTSQPLFAFEWRDPEMGISGQLTWTRLPQGFKNSPTLFNEALHRDLADFRIQHPDLILLQYVDDLLLAATSEQDCQRGTRALLQTLGNLGYRASAKKAQICQKQVKYLGYLLKEGQRWLTEARKETVMGQPTPKTPRQLREFLGTAGFCRLWIPGFAEMAAPLYPLTKPGTLFNWGPDQQKAYQEIKQALLTAPALGLPDLTKPFELFVDEKQGYAKGVLTQKLGPWRRPVAYLSKKLDPVAAGWPPCLRMVAAIAVLTKDAGKLTMGQPLVILAPHAVEALVKQPPDRWLSNARMTHYQAMLLDTDRVQFGPVVALNPATLLPLPEKEAPHDCLEILAETHGTRPDLTDQPIPDADYTWYTDGSSFLQEGQRRAGAAVTTETEVIWARALPAGTSAQRAELIALTQALKMAEGKKLNVYTDSRYAFATAHVHGEIYRRRGWLTSEGREIKNKNEILALLKALFLPKRLSIIHCPGHQKGNSAEARGNRMADQAAREAAMKAVLETSTLLAGKRTADGSEFEKRTADGSEFESPKKKAKVE

SEQ ID NO: 7228 - protein, 2087 aa, synthetic construct
MPAAKRVKLDGGDKKYSIGLDIGTNSVGWAVITDEYKVPSKKFKVLGNTDRHSIKKNLIGALLFDSGETAEATRLKRTARRRYTRRKNRICYLQEIFSNEMAKVDDSFFHRLEESFLVEEDKKHERHPIFGNIVDEVAYHEKYPTIYHLRKKLVDSTDKADLRLIYLALAHMIKFRGHFLIEGDLNPDNSDVDKLFIQLVQTYNQLFEENPINASGVDAKAILSARLSKSRRLENLIAQLPGEKKNGLFGNLIALSLGLTPNFKSNFDLAEDAKLQLSKDTYDDDLDNLLAQIGDQYADLFLAAKNLSDAILLSDILRVNTEITKAPLSASMIKRYDEHHQDLTLLKALVRQQLPEKYKEIFFDQSKNGYAGYIDGGASQEEFYKFIKPILEKMDGTEELLVKLNREDLLRKQRTFDNGSIPHQIHLGELHAILRRQEDFYPFLKDNREKIEKILTFRIPYYVGPLARGNSRFAWMTRKSEETITPWNFEEVVDKGASAQSFIERMTNFDKNLPNEKVLPKHSLLYEYFTVYNELTKVKYVTEGMRKPAFLSGEQKKAIVDLLFKTNRKVTVKQLKEDYFKKIECFDSVEISGVEDRFNASLGTYHDLLKIIKDKDFLDNEENEDILEDIVLTLTLFEDREMIEERLKTYAHLFDDKVMKQLKRRRYTGWGRLSRKLINGIRDKQSGKTILDFLKSDGFANRNFMQLIHDDSLTFKEDIQKAQVSGQGDSLHEHIANLAGSPAIKKGILQTVKVVDELVKVMGRHKPENIVIEMARENQTTQKGQKNSRERMKRIEEGIKELGSQILKEHPVENTQLQNEKLYLYYLQNGRDMYVDQELDINRLSDYDVDHIVPQSFLKDDSIDNKVLTRSDKARGKSDNVPSEEVVKKMKNYWRQLLNAKLITQRKFDNLTKAERGGLSELDKAGFIKRQLVETRQITKHVAQILDSRMNTKYDENDKLIREVKVITLKSKLVSDFRKDFQFYKVREINNYHHAHDAYLNAVVGTALIKKYPKLESEFVYGDYKVYDVRKMIAKSEQEIGKATAKYFFYSNIMNFFKTEITLANGEIRKRPLIETNGETGEIVWDKGRDFATVRKVLSMPQVNIVKKTEVQTGGFSKESILPKRNSDKLIARKKDWDPKKYGGFDSPTVAYSVLVVAKVEKGKSKKLKSVKELLGITIMERSSFEKNPIDFLEAKGYKEVKKDLIIKLPKYSLFELENGRKRMLASAGELQKGNELALPSKYVNFLYLASHYEKLKGSPEDNEQKQLFVEQHKHYLDEIIEQISEFSKRVILADANLDKVLSAYNKHRDKPIREQAENIIHLFTLTNLGAPAAFKYFDTTIDRKRYTSTKEVLDATLIHQSITGLYETRIDLSQLGGDGGEAAAKPAPGGSGGVPWILKKPLELTIKLDLEEQQGTLLNNSILSKKGKEELKQLFEKYSALWQSWENQVGHRRIRPHKIATGTVKPTPQKQYHINPKAKPDIQIVINDLLKQGVLIQKESTMNTPVYPVPKPNGRWRMVLDYRAVNKVTPLIAVQNQHSYGILGSLFKGRYKTTIDLSNGFWAHPIVPEDYWITAFTWQGKQYCWTVLPQGFLNSPGLFNGDVVDLLQGIPNVEVYVDDVYISHDSEKEHLEYLDILFNRLKEAGYIISLKKSNIANSIVDFLGFQITNEGRGLTDTFKEKLENITAPTTLKQLQSILGLLNFARNFIPDFTELIAPLYALIPKSPKNYVPWQIEHSTTLETLITKLNGAEYLQGRKGDKTLIMKVNASYTTGYIRYYNEGEKKPISYVSIVFSKTELKFTELEKLLTTVHKGLLKALDLSMGQNIHVYSPIVSMQNIQKTPQTAKKALASRWLSWLSYLEDPRIRFFYDPQMPALKDLPAVDTGKDNKKHPSNFQHIFYTDGSAITSPTKEGHLNAGMGIVYFINKDGNLQKQQEWSISLGNHTAQFAEIAAFEFALKKCLPLGGNILVVTDSNYVAKAYNEELDVWASNGFVNNRKKPLKHISKWKSVADLKRLRPDVVVTHEPGHQKLDSSPHAYGNNLADQLATQASFKVHAGKRTADGSEFEKRTADGSEFESPKKKAKVE

SEQ ID NO: 7229 - protein, 2176 aa, synthetic construct
MPAAKRVKLDGGDKKYSIGLDIGTNSVGWAVITDEYKVPSKKFKVLGNTDRHSIKKNLIGALLFDSGETAEATRLKRTARRRYTRRKNRICYLQEIFSNEMAKVDDSFFHRLEESFLVEEDKKHERHPIFGNIVDEVAYHEKYPTIYHLRKKLVDSTDKADLRLIYLALAHMIKFRGHFLIEGDLNPDNSDVDKLFIQLVQTYNQLFEENPINASGVDAKAILSARLSKSRRLENLIAQLPGEKKNGLFGNLIALSLGLTPNFKSNFDLAEDAKLQLSKDTYDDDLDNLLAQIGDQYADLFLAAKNLSDAILLSDILRVNTEITKAPLSASMIKRYDEHHQDLTLLKALVRQQLPEKYKEIFFDQSKNGYAGYIDGGASQEEFYKFIKPILEKMDGTEELLVKLNREDLLRKQRTFDNGSIPHQIHLGELHAILRRQEDFYPFLKDNREKIEKILTFRIPYYVGPLARGNSRFAWMTRKSEETITPWNFEEVVDKGASAQSFIERMTNFDKNLPNEKVLPKHSLLYEYFTVYNELTKVKYVTEGMRKPAFLSGEQKKAIVDLLFKTNRKVTVKQLKEDYFKKIECFDSVEISGVEDRFNASLGTYHDLLKIIKDKDFLDNEENEDILEDIVLTLTLFEDREMIEERLKTYAHLFDDKVMKQLKRRRYTGWGRLSRKLINGIRDKQSGKTILDFLKSDGFANRNFMQLIHDDSLTFKEDIQKAQVSGQGDSLHEHIANLAGSPAIKKGILQTVKVVDELVKVMGRHKPENIVIEMARENQTTQKGQKNSRERMKRIEEGIKELGSQILKEHPVENTQLQNEKLYLYYLQNGRDMYVDQELDINRLSDYDVDHIVPQSFLKDDSIDNKVLTRSDKARGKSDNVPSEEVVKKMKNYWRQLLNAKLITQRKFDNLTKAERGGLSELDKAGFIKRQLVETRQITKHVAQILDSRMNTKYDENDKLIREVKVITLKSKLVSDFRKDFQFYKVREINNYHHAHDAYLNAVVGTALIKKYPKLESEFVYGDYKVYDVRKMIAKSEQEIGKATAKYFFYSNIMNFFKTEITLANGEIRKRPLIETNGETGEIVWDKGRDFATVRKVLSMPQVNIVKKTEVQTGGFSKESILPKRNSDKLIARKKDWDPKKYGGFDSPTVAYSVLVVAKVEKGKSKKLKSVKELLGITIMERSSFEKNPIDFLEAKGYKEVKKDLIIKLPKYSLFELENGRKRMLASAGELQKGNELALPSKYVNFLYLASHYEKLKGSPEDNEQKQLFVEQHKHYLDEIIEQISEFSKRVILADANLDKVLSAYNKHRDKPIREQAENIIHLFTLTNLGAPAAFKYFDTTIDRKRYTSTKEVLDATLIHQSITGLYETRIDLSQLGGDGGEAAAKPAPGGSGGMNPLQLLQPLPAEIKGTKLLAHWNSGATITCIPESFLEDEQPIKKTLIKTIHGEKQQNVYYVTFKVKGRKVEAEVIASPYEYILLSPTDVPWLTQQPLQLTILVPLQEYQEKILSKTALPEDQKQQLKTLFVKYDNLWQHWENQVGHRKIRPHNIATGDYPPRPQKQYPINPKAKPSIQIVIDDLLKQGVLTPQNSTMNTPVYPVPKPDGRWRMVLDYREVNKTIPLTAAQNQHSAGILATIVRQKYKTTLDLANGFWAHPITPESYWLTAFTWQGKQYCWTRLPQGFLNSPALFNADVVDLLKEIPNVQVYVDDIYLSHDDPKEHVQQLEKVFQILLQAGYVVSLKKSEIGQKTVEFLGFNITKEGRGLTDTFKTKLLNITPPKDLKQLQSILGLLNFARNFIPNFAELVQPLYNLIAPAKGKYIEWSEENTKQLNMVIEALNTASNLEERLPEQRLVIKVNTSPSAGYVRYYNETGKKPIMYLNYVFSKAELKFSMLEKLLTTMHKALIKAMDLAMGQEILVYSPIVSMTKIQKTPLPERKALPIRWITWMTYLEDPRIQFHYDKTLPELKHIPDVYTSSQSPVKHPSQYEGVFYTDGSAIKSPDPTKSNNAGMGIVHATYKPEYQVLNQWSIPLGNHTAQMAEIAAVEFACKKALKIPGPVLVITDSFYVAESANKELPYWKSNGFVNNKKKPLKHISKWKSIAECLSMKPDITIQHEKGISLQIPVFILKGNALADKLATQGSYVVNAGKRTADGSEFEKRTADGSEFESPKKKAKVE

SEQ ID NO: 7230 - protein, 2094 aa, synthetic construct
MPAAKRVKLDGGDKKYSIGLDIGTNSVGWAVITDEYKVPSKKFKVLGNTDRHSIKKNLIGALLFDSGETAEATRLKRTARRRYTRRKNRICYLQEIFSNEMAKVDDSFFHRLEESFLVEEDKKHERHPIFGNIVDEVAYHEKYPTIYHLRKKLVDSTDKADLRLIYLALAHMIKFRGHFLIEGDLNPDNSDVDKLFIQLVQTYNQLFEENPINASGVDAKAILSARLSKSRRLENLIAQLPGEKKNGLFGNLIALSLGLTPNFKSNFDLAEDAKLQLSKDTYDDDLDNLLAQIGDQYADLFLAAKNLSDAILLSDILRVNTEITKAPLSASMIKRYDEHHQDLTLLKALVRQQLPEKYKEIFFDQSKNGYAGYIDGGASQEEFYKFIKPILEKMDGTEELLVKLNREDLLRKQRTFDNGSIPHQIHLGELHAILRRQEDFYPFLKDNREKIEKILTFRIPYYVGPLARGNSRFAWMTRKSEETITPWNFEEVVDKGASAQSFIERMTNFDKNLPNEKVLPKHSLLYEYFTVYNELTKVKYVTEGMRKPAFLSGEQKKAIVDLLFKTNRKVTVKQLKEDYFKKIECFDSVEISGVEDRFNASLGTYHDLLKIIKDKDFLDNEENEDILEDIVLTLTLFEDREMIEERLKTYAHLFDDKVMKQLKRRRYTGWGRLSRKLINGIRDKQSGKTILDFLKSDGFANRNFMQLIHDDSLTFKEDIQKAQVSGQGDSLHEHIANLAGSPAIKKGILQTVKVVDELVKVMGRHKPENIVIEMARENQTTQKGQKNSRERMKRIEEGIKELGSQILKEHPVENTQLQNEKLYLYYLQNGRDMYVDQELDINRLSDYDVDHIVPQSFLKDDSIDNKVLTRSDKARGKSDNVPSEEVVKKMKNYWRQLLNAKLITQRKFDNLTKAERGGLSELDKAGFIKRQLVETRQITKHVAQILDSRMNTKYDENDKLIREVKVITLKSKLVSDFRKDFQFYKVREINNYHHAHDAYLNAVVGTALIKKYPKLESEFVYGDYKVYDVRKMIAKSEQEIGKATAKYFFYSNIMNFFKTEITLANGEIRKRPLIETNGETGEIVWDKGRDFATVRKVLSMPQVNIVKKTEVQTGGFSKESILPKRNSDKLIARKKDWDPKKYGGFDSPTVAYSVLVVAKVEKGKSKKLKSVKELLGITIMERSSFEKNPIDFLEAKGYKEVKKDLIIKLPKYSLFELENGRKRMLASAGELQKGNELALPSKYVNFLYLASHYEKLKGSPEDNEQKQLFVEQHKHYLDEIIEQISEFSKRVILADANLDKVLSAYNKHRDKPIREQAENIIHLFTLTNLGAPAAFKYFDTTIDRKRYTSTKEVLDATLIHQSITGLYETRIDLSQLGGDGGEAAAKPAPGGSGGVLNLEEEYRLHEKPVPSSIDPSWLQLFPTVWAERAGMGLANQVPPVVVELRSGASPVAVRQYPMSKEAREGIRPHIQKFLDLGVLVPCRSPWNTPLLPVKKPGTNDYRPVQDLREINKRVQDIHPTVPNPYNLLSSLPPSYTWYSVLDLKDAFFCLRLHPNSQPLFAFEWKDPEKGNTGQLTWTRLPQGFKNSPTLFNEALHRDLAPFRALNPQVVLLQYVDDLLVAAPTYEDCKKGTQKLLQELSKLGYRVSAKKAQLCQREVTYLGYLLKEGKRWLTPARKATVMKIPVPTTPRQVREFLGTAGFCRLWIPGFASLAAPLYPLTKPSIPFIWTEEHQQAFDHIKKALLSAPALALPDLTKPFTLYIDERAGVARGVLTQTLGPWRRPVAYLSKKLDPVASGWPTCLKAVAAVALLLKDADKLTLGQNVTVIASHSLESIVRQPPDRWMTNARMTHYQSLLLNERVSFAPPAVLNPATLLPVESEATPVHRCSEILAEETGTRRDLEDQPLPGVPTWYTDGSSFITEGKRRAGAPIVDGKRTVWASSLPEGTSAQKAELVALTQALRLAEGKNINIYTDSRYAFATAHIHGAIYKQRGWLTSAGKDIKNKEEILALLEAIHLPRRVAIIHCPGHQRGSNPVATGNRRADEAAKQAALSTRVLAGTTKPAGKRTADGSEFEKRTADGSEFESPKKKAKVE

SEQ ID NO: 7231 - protein, 2127 aa, synthetic construct
MPAAKRVKLDGGDKKYSIGLDIGTNSVGWAVITDEYKVPSKKFKVLGNTDRHSIKKNLIGALLFDSGETAEATRLKRTARRRYTRRKNRICYLQEIFSNEMAKVDDSFFHRLEESFLVEEDKKHERHPIFGNIVDEVAYHEKYPTIYHLRKKLVDSTDKADLRLIYLALAHMIKFRGHFLIEGDLNPDNSDVDKLFIQLVQTYNQLFEENPINASGVDAKAILSARLSKSRRLENLIAQLPGEKKNGLFGNLIALSLGLTPNFKSNFDLAEDAKLQLSKDTYDDDLDNLLAQIGDQYADLFLAAKNLSDAILLSDILRVNTEITKAPLSASMIKRYDEHHQDLTLLKALVRQQLPEKYKEIFFDQSKNGYAGYIDGGASQEEFYKFIKPILEKMDGTEELLVKLNREDLLRKQRTFDNGSIPHQIHLGELHAILRRQEDFYPFLKDNREKIEKILTFRIPYYVGPLARGNSRFAWMTRKSEETITPWNFEEVVDKGASAQSFIERMTNFDKNLPNEKVLPKHSLLYEYFTVYNELTKVKYVTEGMRKPAFLSGEQKKAIVDLLFKTNRKVTVKQLKEDYFKKIECFDSVEISGVEDRFNASLGTYHDLLKIIKDKDFLDNEENEDILEDIVLTLTLFEDREMIEERLKTYAHLFDDKVMKQLKRRRYTGWGRLSRKLINGIRDKQSGKTILDFLKSDGFANRNFMQLIHDDSLTFKEDIQKAQVSGQGDSLHEHIANLAGSPAIKKGILQTVKVVDELVKVMGRHKPENIVIEMARENQTTQKGQKNSRERMKRIEEGIKELGSQILKEHPVENTQLQNEKLYLYYLQNGRDMYVDQELDINRLSDYDVDHIVPQSFLKDDSIDNKVLTRSDKARGKSDNVPSEEVVKKMKNYWRQLLNAKLITQRKFDNLTKAERGGLSELDKAGFIKRQLVETRQITKHVAQILDSRMNTKYDENDKLIREVKVITLKSKLVSDFRKDFQFYKVREINNYHHAHDAYLNAVVGTALIKKYPKLESEFVYGDYKVYDVRKMIAKSEQEIGKATAKYFFYSNIMNFFKTEITLANGEIRKRPLIETNGETGEIVWDKGRDFATVRKVLSMPQVNIVKKTEVQTGGFSKESILPKRNSDKLIARKKDWDPKKYGGFDSPTVAYSVLVVAKVEKGKSKKLKSVKELLGITIMERSSFEKNPIDFLEAKGYKEVKKDLIIKLPKYSLFELENGRKRMLASAGELQKGNELALPSKYVNFLYLASHYEKLKGSPEDNEQKQLFVEQHKHYLDEIIEQISEFSKRVILADANLDKVLSAYNKHRDKPIREQAENIIHLFTLTNLGAPAAFKYFDTTIDRKRYTSTKEVLDATLIHQSITGLYETRIDLSQLGGDGGEAAAKPAPGGSGGLLGRDLLTKLKAQIQFSTEGPQVTWEDRPAMCLVLNLEEEYRLHEKPVPPSIDPSWLQLFPMVWAEKAGMGLANQVPPVVVELKSDASPVAVRQYPMSKEAREGIRPHIQRFLDLGILVPCQSPWNTPLLPVKKPGTNDYRPVQDLREVNKRVQDIHPTVPNPYNLLSSLPPSHTWYSVLDLKDAFFCLKLHPNSQPLFAFEWRDPEKGNTGQLTWTRLPQGFKNSPTLFNEALHRDLASFRALNPQVVMLQYVDDLLVAAPTYRDCKEGTRRLLQELSKLGYRVSAKKAQLCREEVTYLGYLLKGGKRWLTPARKATVMKIPTPTTPRQVREFLGTAGFCRLWIPGFASLAAPLYPLTRPKVPFTWTEAHQEAFGRIKEALLSAPALALPDLTKPFALYVDEKEGVARGVLTQTLGPWRRPVAYLSKKLDPVASGWPTCLKAIAAVALLLKDADKLTLGQNVLVIAPHNLESIVRQPPDRWMTNARMTHYQSLLLNERVSFAPPAILNPATLLPVESDDTPIHICSEILAEETGTRPDLRDQPLPGVPAWYTDGSSFIMDGRRQAGAAIVDNKRTVWASNLPEGTSAQKAELIALTQALRLAEGKSINIYTDSRYAFATAHVHGAIYKQRGWLTSAGKDIKNKEEILALLEAIHLPKRVAIIHCPGHQRGTDPVATGNRKADEAAKQAAQSTRILTETTKNAGKRTADGSEFEKRTADGSEFESPKKKAKVE

SEQ ID NO: 7232 - protein, 2218 aa, synthetic construct
MPAAKRVKLDGGDKKYSIGLDIGTNSVGWAVITDEYKVPSKKFKVLGNTDRHSIKKNLIGALLFDSGETAEATRLKRTARRRYTRRKNRICYLQEIFSNEMAKVDDSFFHRLEESFLVEEDKKHERHPIFGNIVDEVAYHEKYPTIYHLRKKLVDSTDKADLRLIYLALAHMIKFRGHFLIEGDLNPDNSDVDKLFIQLVQTYNQLFEENPINASGVDAKAILSARLSKSRRLENLIAQLPGEKKNGLFGNLIALSLGLTPNFKSNFDLAEDAKLQLSKDTYDDDLDNLLAQIGDQYADLFLAAKNLSDAILLSDILRVNTEITKAPLSASMIKRYDEHHQDLTLLKALVRQQLPEKYKEIFFDQSKNGYAGYIDGGASQEEFYKFIKPILEKMDGTEELLVKLNREDLLRKQRTFDNGSIPHQIHLGELHAILRRQEDFYPFLKDNREKIEKILTFRIPYYVGPLARGNSRFAWMTRKSEETITPWNFEEVVDKGASAQSFIERMTNFDKNLPNEKVLPKHSLLYEYFTVYNELTKVKYVTEGMRKPAFLSGEQKKAIVDLLFKTNRKVTVKQLKEDYFKKIECFDSVEISGVEDRFNASLGTYHDLLKIIKDKDFLDNEENEDILEDIVLTLTLFEDREMIEERLKTYAHLFDDKVMKQLKRRRYTGWGRLSRKLINGIRDKQSGKTILDFLKSDGFANRNFMQLIHDDSLTFKEDIQKAQVSGQGDSLHEHIANLAGSPAIKKGILQTVKVVDELVKVMGRHKPENIVIEMARENQTTQKGQKNSRERMKRIEEGIKELGSQILKEHPVENTQLQNEKLYLYYLQNGRDMYVDQELDINRLSDYDVDHIVPQSFLKDDSIDNKVLTRSDKARGKSDNVPSEEVVKKMKNYWRQLLNAKLITQRKFDNLTKAERGGLSELDKAGFIKRQLVETRQITKHVAQILDSRMNTKYDENDKLIREVKVITLKSKLVSDFRKDFQFYKVREINNYHHAHDAYLNAVVGTALIKKYPKLESEFVYGDYKVYDVRKMIAKSEQEIGKATAKYFFYSNIMNFFKTEITLANGEIRKRPLIETNGETGEIVWDKGRDFATVRKVLSMPQVNIVKKTEVQTGGFSKESILPKRNSDKLIARKKDWDPKKYGGFDSPTVAYSVLVVAKVEKGKSKKLKSVKELLGITIMERSSFEKNPIDFLEAKGYKEVKKDLIIKLPKYSLFELENGRKRMLASAGELQKGNELALPSKYVNFLYLASHYEKLKGSPEDNEQKQLFVEQHKHYLDEIIEQISEFSKRVILADANLDKVLSAYNKHRDKPIREQAENIIHLFTLTNLGAPAAFKYFDTTIDRKRYTSTKEVLDATLIHQSITGLYETRIDLSQLGGDGGEAAAKPAPGGSGGTLGDQGSRGSDPLPEPRVTLTVEGIPTEFLVNTGAEHSVLTKPMGKMGSKRTVVAGATGSKVYPWTTKRLLKIGQKQVTHSFLVIPECPAPLLGRDLLTKLKAQIQFSTEGPQVTWEDRPAMCLVLNLEEEYRLHEKPVPPSIDPSWLQLFPMVWAEKAGMGLANQVPPVVVELKSDASPVAVRQYPMSKEAREGIRPHIQRFLDLGILVPCQSPWNTPLLPVKKPGTNDYRPVQDLREVNKRVQDIHPTVPNPYNLLSSLPPSHTWYSVLDLKDAFFCLKLHPNSQPLFAFEWRDPEKGNTGQLTWTRLPQGFKNSPTLFNEALHRDLASFRALNPQVVMLQYVDDLLVAAPTYRDCKEGTRRLLQELSKLGYRVSAKKAQLCREEVTYLGYLLKGGKRWLTPARKATVMKIPTPTTPRQVREFLGTAGFCRLWIPGFASLAAPLYPLTRPKVPFTWTEAHQEAFGRIKEALLSAPALALPDLTKPFALYVDEKEGVARGVLTQTLGPWRRPVAYLSKKLDPVASGWPTCLKAIAAVALLLKDADKLTLGQNVLVIAPHNLESIVRQPPDRWMTNARMTHYQSLLLNERVSFAPPAILNPATLLPVESDDTPIHICSEILAEETGTRPDLRDQPLPGVPAWYTDGSSFIMDGRRQAGAAIVDNKRTVWASNLPEGTSAQKAELIALTQALRLAEGKSINIYTDSRYAFATAHVHGAIYKQRGWLTSAGKDIKNKEEILALLEAIHLPKRVAIIHCPGHQRGTDPVATGNRKADEAAKQAAQSTRILTETTKNAGKRTADGSEFEKRTADGSEFESPKKKAKVE

SEQ ID NO: 7233 - protein, 2096 aa, synthetic construct
MPAAKRVKLDGGDKKYSIGLDIGTNSVGWAVITDEYKVPSKKFKVLGNTDRHSIKKNLIGALLFDSGETAEATRLKRTARRRYTRRKNRICYLQEIFSNEMAKVDDSFFHRLEESFLVEEDKKHERHPIFGNIVDEVAYHEKYPTIYHLRKKLVDSTDKADLRLIYLALAHMIKFRGHFLIEGDLNPDNSDVDKLFIQLVQTYNQLFEENPINASGVDAKAILSARLSKSRRLENLIAQLPGEKKNGLFGNLIALSLGLTPNFKSNFDLAEDAKLQLSKDTYDDDLDNLLAQIGDQYADLFLAAKNLSDAILLSDILRVNTEITKAPLSASMIKRYDEHHQDLTLLKALVRQQLPEKYKEIFFDQSKNGYAGYIDGGASQEEFYKFIKPILEKMDGTEELLVKLNREDLLRKQRTFDNGSIPHQIHLGELHAILRRQEDFYPFLKDNREKIEKILTFRIPYYVGPLARGNSRFAWMTRKSEETITPWNFEEVVDKGASAQSFIERMTNFDKNLPNEKVLPKHSLLYEYFTVYNELTKVKYVTEGMRKPAFLSGEQKKAIVDLLFKTNRKVTVKQLKEDYFKKIECFDSVEISGVEDRFNASLGTYHDLLKIIKDKDFLDNEENEDILEDIVLTLTLFEDREMIEERLKTYAHLFDDKVMKQLKRRRYTGWGRLSRKLINGIRDKQSGKTILDFLKSDGFANRNFMQLIHDDSLTFKEDIQKAQVSGQGDSLHEHIANLAGSPAIKKGILQTVKVVDELVKVMGRHKPENIVIEMARENQTTQKGQKNSRERMKRIEEGIKELGSQILKEHPVENTQLQNEKLYLYYLQNGRDMYVDQELDINRLSDYDVDHIVPQSFLKDDSIDNKVLTRSDKARGKSDNVPSEEVVKKMKNYWRQLLNAKLITQRKFDNLTKAERGGLSELDKAGFIKRQLVETRQITKHVAQILDSRMNTKYDENDKLIREVKVITLKSKLVSDFRKDFQFYKVREINNYHHAHDAYLNAVVGTALIKKYPKLESEFVYGDYKVYDVRKMIAKSEQEIGKATAKYFFYSNIMNFFKTEITLANGEIRKRPLIETNGETGEIVWDKGRDFATVRKVLSMPQVNIVKKTEVQTGGFSKESILPKRNSDKLIARKKDWDPKKYGGFDSPTVAYSVLVVAKVEKGKSKKLKSVKELLGITIMERSSFEKNPIDFLEAKGYKEVKKDLIIKLPKYSLFELENGRKRMLASAGELQKGNELALPSKYVNFLYLASHYEKLKGSPEDNEQKQLFVEQHKHYLDEIIEQISEFSKRVILADANLDKVLSAYNKHRDKPIREQAENIIHLFTLTNLGAPAAFKYFDTTIDRKRYTSTKEVLDATLIHQSITGLYETRIDLSQLGGDGGEAAAKPAPGGSGGTLGIEDEYRLHETSTEPDVSLGSTWLSDFPQAWAETGGMGLAVRQAPLIIPLKATSTPVSIQQYPMSHEARLGIKPHIQRLLDQGILVPCQSPWNTPLLPVKKPGTNDYRPVQDLREVNKRVEDIHPTVPNPYNLLSGLPPSHQWYTVLDLKDAFFCLRLHPTSQPLFAFEWRDPGMGISGQLTWTRLPQGFKNSPTLFNEALHRDLADFRIQHPDLILLQYVDDILLAATSELDCQQGTRALLQTLGDLGYRASAKKAQICQKQVKYLGYLLREGQRWLTEARKETVMGQPVPKTPRQLREFLGTAGFCRLWIPGFAEMAAPLYPLTKPGTLFSWGPDQQKAYQEIKQALLTAPALGLPDLTKPFELFVDEKQGYAKGVLTQKLGPWRRPVAYLSKKLDPVAAGWPPCLRMVAAIAVLTKDAGKLTMGQPLVILAPHAVEALVKQPPDRWLSNARMTHYQAMLLDTDRVQFGPVVALNPATLLPLPEEGAPHDCLEILAETHGTRPDLTDQPIPDADHTWYTDGSSFLQEGQRKAGAAVTTETEVIWAGALPAGTSAQRAELIALTQALKMAEGKRLNVYTDSRYAFATAHIHGEIYRRRGWLTSEGREIKNKSEILALLKALFLPKRLSIIHCLGHQKGDSAEARGNRLADQAAREAAIKTPPDTSTLLAGKRTADGSEFEKRTADGSEFESPKKKAKVE

SEQ ID NO: 7234 - protein, 2096 aa, synthetic construct
MPAAKRVKLDGGDKKYSIGLDIGTNSVGWAVITDEYKVPSKKFKVLGNTDRHSIKKNLIGALLFDSGETAEATRLKRTARRRYTRRKNRICYLQEIFSNEMAKVDDSFFHRLEESFLVEEDKKHERHPIFGNIVDEVAYHEKYPTIYHLRKKLVDSTDKADLRLIYLALAHMIKFRGHFLIEGDLNPDNSDVDKLFIQLVQTYNQLFEENPINASGVDAKAILSARLSKSRRLENLIAQLPGEKKNGLFGNLIALSLGLTPNFKSNFDLAEDAKLQLSKDTYDDDLDNLLAQIGDQYADLFLAAKNLSDAILLSDILRVNTEITKAPLSASMIKRYDEHHQDLTLLKALVRQQLPEKYKEIFFDQSKNGYAGYIDGGASQEEFYKFIKPILEKMDGTEELLVKLNREDLLRKQRTFDNGSIPHQIHLGELHAILRRQEDFYPFLKDNREKIEKILTFRIPYYVGPLARGNSRFAWMTRKSEETITPWNFEEVVDKGASAQSFIERMTNFDKNLPNEKVLPKHSLLYEYFTVYNELTKVKYVTEGMRKPAFLSGEQKKAIVDLLFKTNRKVTVKQLKEDYFKKIECFDSVEISGVEDRFNASLGTYHDLLKIIKDKDFLDNEENEDILEDIVLTLTLFEDREMIEERLKTYAHLFDDKVMKQLKRRRYTGWGRLSRKLINGIRDKQSGKTILDFLKSDGFANRNFMQLIHDDSLTFKEDIQKAQVSGQGDSLHEHIANLAGSPAIKKGILQTVKVVDELVKVMGRHKPENIVIEMARENQTTQKGQKNSRERMKRIEEGIKELGSQILKEHPVENTQLQNEKLYLYYLQNGRDMYVDQELDINRLSDYDVDHIVPQSFLKDDSIDNKVLTRSDKARGKSDNVPSEEVVKKMKNYWRQLLNAKLITQRKFDNLTKAERGGLSELDKAGFIKRQLVETRQITKHVAQILDSRMNTKYDENDKLIREVKVITLKSKLVSDFRKDFQFYKVREINNYHHAHDAYLNAVVGTALIKKYPKLESEFVYGDYKVYDVRKMIAKSEQEIGKATAKYFFYSNIMNFFKTEITLANGEIRKRPLIETNGETGEIVWDKGRDFATVRKVLSMPQVNIVKKTEVQTGGFSKESILPKRNSDKLIARKKDWDPKKYGGFDSPTVAYSVLVVAKVEKGKSKKLKSVKELLGITIMERSSFEKNPIDFLEAKGYKEVKKDLIIKLPKYSLFELENGRKRMLASAGELQKGNELALPSKYVNFLYLASHYEKLKGSPEDNEQKQLFVEQHKHYLDEIIEQISEFSKRVILADANLDKVLSAYNKHRDKPIREQAENIIHLFTLTNLGAPAAFKYFDTTIDRKRYTSTKEVLDATLIHQSITGLYETRIDLSQLGGDGGEAAAKPAPGGSGGTLGIEDEYRLHETSTEPDVSLGSTWLSDFPQAWAETGGMGLAVRQAPLIIPLKATSTPVSIQQYPMSHEARLGIKPHIQRLLDQGILVPCQSPWNTPLLPVKKPGTNDYRPVQDLREVNKRVEDIHPTVPNPYNLLSGLPPSHQWYTVLDLKDAFFCLRLHPTSQPLFAFEWRDPGMGISGQLTWTRLPQGFKNSPTLFDEALHRDLADFRIQHPDLILLQYVDDILLAATSELDCQQGTRALLQTLGDLGYRASAKKAQICQKQVKYLGYLLREGQRWLTEARKETVMGQPVPKTPRQLREFLGTAGFCRLWIPGFAEMAAPLYPLTKTGTLFSWGPDQQKAYQEIKQALLTAPALGLPDLTKPFELFVDEKQGYAKGVLTQKLGPWRRPVAYLSKKLDPVAAGWPPCLRMVAAIAVLTKDAGKLTMGQPLVILAPHAVEALVKQPPDRWLSNARMTHYQAMLLDTDRVQFGPVVALNPATLLPLPEEGAPHDCLEILAETHGTRPDLTDQPIPDADHTWYTDGSSFLQEGQRKAGAAVTTETEVIWAGALPAGTSAQRAELIALTQALKMAEGKRLNVYTDSRYAFATAHIHGEIYRRRGLLTSEGREIKNKSEILALLKALFLPKRLSIIHCLGHQKGDSAEARGNRLADQAAREAAIKTPPDTSTLLAGKRTADGSEFEKRTADGSEFESPKKKAKVE

SEQ ID NO: 7235 - protein, 2096 aa, synthetic construct; identical to SEQ ID NO: 7233

SEQ ID NO: 7236 - protein, 2096 aa, synthetic construct
MPAAKRVKLDGGDKKYSIGLDIGTNSVGWAVITDEYKVPSKKFKVLGNTDRHSIKKNLIGALLFDSGETAEATRLKRTARRRYTRRKNRICYLQEIFSNEMAKVDDSFFHRLEESFLVEEDKKHERHPIFGNIVDEVAYHEKYPTIYHLRKKLVDSTDKADLRLIYLALAHMIKFRGHFLIEGDLNPDNSDVDKLFIQLVQTYNQLFEENPINASGVDAKAILSARLSKSRRLENLIAQLPGEKKNGLFGNLIALSLGLTPNFKSNFDLAEDAKLQLSKDTYDDDLDNLLAQIGDQYADLFLAAKNLSDAILLSDILRVNTEITKAPLSASMIKRYDEHHQDLTLLKALVRQQLPEKYKEIFFDQSKNGYAGYIDGGASQEEFYKFIKPILEKMDGTEELLVKLNREDLLRKQRTFDNGSIPHQIHLGELHAILRRQEDFYPFLKDNREKIEKILTFRIPYYVGPLARGNSRFAWMTRKSEETITPWNFEEVVDKGASAQSFIERMTNFDKNLPNEKVLPKHSLLYEYFTVYNELTKVKYVTEGMRKPAFLSGEQKKAIVDLLFKTNRKVTVKQLKEDYFKKIECFDSVEISGVEDRFNASLGTYHDLLKIIKDKDFLDNEENEDILEDIVLTLTLFEDREMIEERLKTYAHLFDDKVMKQLKRRRYTGWGRLSRKLINGIRDKQSGKTILDFLKSDGFANRNFMQLIHDDSLTFKEDIQKAQVSGQGDSLHEHIANLAGSPAIKKGILQTVKVVDELVKVMGRHKPENIVIEMARENQTTQKGQKNSRERMKRIEEGIKELGSQILKEHPVENTQLQNEKLYLYYLQNGRDMYVDQELDINRLSDYDVDHIVPQSFLKDDSIDNKVLTRSDKARGKSDNVPSEEVVKKMKNYWRQLLNAKLITQRKFDNLTKAERGGLSELDKAGFIKRQLVETRQITKHVAQILDSRMNTKYDENDKLIREVKVITLKSKLVSDFRKDFQFYKVREINNYHHAHDAYLNAVVGTALIKKYPKLESEFVYGDYKVYDVRKMIAKSEQEIGKATAKYFFYSNIMNFFKTEITLANGEIRKRPLIETNGETGEIVWDKGRDFATVRKVLSMPQVNIVKKTEVQTGGFSKESILPKRNSDKLIARKKDWDPKKYGGFDSPTVAYSVLVVAKVEKGKSKKLKSVKELLGITIMERSSFEKNPIDFLEAKGYKEVKKDLIIKLPKYSLFELENGRKRMLASAGELQKGNELALPSKYVNFLYLASHYEKLKGSPEDNEQKQLFVEQHKHYLDEIIEQISEFSKRVILADANLDKVLSAYNKHRDKPIREQAENIIHLFTLTNLGAPAAFKYFDTTIDRKRYTSTKEVLDATLIHQSITGLYETRIDLSQLGGDGGEAAAKPAPGGSGGTLNIEDEYRLHEISTEPDVSPGSTWLSDFPQAWAETGGMGLAVRQAPLIIPLKATSTPVSIKQYPMSQEAKLGIKPHIQRLLDQGILVPCQSPWNTPLLPVKKPGTNDYRPVQGLREVNKRVEDIHPTVPNPYNLLSGLPTSHRWYTVLDLKDAFFCLRLHPTSQPLFASEWRDPGMGISGQLTWTRLPQGFKNSPTLFNEALHRGLADFRIQHPDLILLQYVDDLLLAATSELDCQQGTRALLKTLGNLGYRASAKKAQICQKQVKYLGYLLREGQRWLTEARKETVMGQPTPKTPRQLREFLGKAGFCRLFIPRFAEMAAPLYPLTKPGTLFNWGPDQQKAYHEIKQALLTAPALGLPDLTKPFELFVDEKQGYAKGVLTQKLGPWRRPVAYLSKKLDPVAAGWPPCLRMVAAIAVLTKDAGKLTMGQPLVILAPHAVEALVKQPPDRWLSNARMTHYQAMLLDTDRVQFGPVVALNPATLLPLPEEGAPHDCLEILAETHGTEPDLTDQPIPDADHTWYTDGSSFLQEGQRKAGAAVTTETEVIWARALPAGTSAQRAELIALTQALKMAEGKRLNVYTDSRYAFATAHIHGEIYKRRGWLTSEGREIKNKSEILALLKALFLPKRLSIIHCLGHQKGDSAEARGNRLADQAAREAAIKTPPDTSTLLAGKRTADGSEFEKRTADGSEFESPKKKAKVE

SEQ ID NO: 7237 - protein, 2116 aa, synthetic construct
MPAAKRVKLDGGDKKYSIGLDIGTNSVGWAVITDEYKVPSKKFKVLGNTDRHSIKKNLIGALLFDSGETAEATRLKRTARRRYTRRKNRICYLQEIFSNEMAKVDDSFFHRLEESFLVEEDKKHERHPIFGNIVDEVAYHEKYPTIYHLRKKLVDSTDKADLRLIYLALAHMIKFRGHFLIEGDLNPDNSDVDKLFIQLVQTYNQLFEENPINASGVDAKAILSARLSKSRRLENLIAQLPGEKKNGLFGNLIALSLGLTPNFKSNFDLAEDAKLQLSKDTYDDDLDNLLAQIGDQYADLFLAAKNLSDAILLSDILRVNTEITKAPLSASMIKRYDEHHQDLTLLKALVRQQLPEKYKEIFFDQSKNGYAGYIDGGASQEEFYKFIKPILEKMDGTEELLVKLNREDLLRKQRTFDNGSIPHQIHLGELHAILRRQEDFYPFLKDNREKIEKILTFRIPYYVGPLARGNSRFAWMTRKSEETITPWNFEEVVDKGASAQSFIERMTNFDKNLPNEKVLPKHSLLYEYFTVYNELTKVKYVTEGMRKPAFLSGEQKKAIVDLLFKTNRKVTVKQLKEDYFKKIECFDSVEISGVEDRFNASLGTYHDLLKIIKDKDFLDNEENEDILEDIVLTLTLFEDREMIEERLKTYAHLFDDKVMKQLKRRRYTGWGRLSRKLINGIRDKQSGKTILDFLKSDGFANRNFMQLIHDDSLTFKEDIQKAQVSGQGDSLHEHIANLAGSPAIKKGILQTVKVVDELVKVMGRHKPENIVIEMARENQTTQKGQKNSRERMKRIEEGIKELGSQILKEHPVENTQLQNEKLYLYYLQNGRDMYVDQELDINRLSDYDVDHIVPQSFLKDDSIDNKVLTRSDKARGKSDNVPSEEVVKKMKNYWRQLLNAKLITQRKFDNLTKAERGGLSELDKAGFIKRQLVETRQITKHVAQILDSRMNTKYDENDKLIREVKVITLKSKLVSDFRKDFQFYKVREINNYHHAHDAYLNAVVGTALIKKYPKLESEFVYGDYKVYDVRKMIAKSEQEIGKATAKYFFYSNIMNFFKTEITLANGEIRKRPLIETNGETGEIVWDKGRDFATVRKVLSMPQVNIVKKTEVQTGGFSKESILPKRNSDKLIARKKDWDPKKYGGFDSPTVAYSVLVVAKVEKGKSKKLKSVKELLGITIMERSSFEKNPIDFLEAKGYKEVKKDLIIKLPKYSLFELENGRKRMLASAGELQKGNELALPSKYVNFLYLASHYEKLKGSPEDNEQKQLFVEQHKHYLDEIIEQISEFSKRVILADANLDKVLSAYNKHRDKPIREQAENIIHLFTLTNLGAPAAFKYFDTTIDRKRYTSTKEVLDATLIHQSITGLYETRIDLSQLGGDGGEAAAKPAPGGSGGVQEISDSRPMLHIYLNGRRFLGLLDTGADKTCIAGRDWPANWPIHQTESSLQGLGMACGVARSSQPLRWQHEDKSGIIHPFVIPTLPFTLWGRDIMKDIKVRLMTDSPDDSQDLMIGAIESNLFADQISWKSDQPVWLNQWPLKQEKLQALQQLVTEQLQLGHLEESNSPWNTPVFVIKKKSGKWRLLQDLRAVNATMHDMGALQPGLPSPVAVPKGWEIIIIDLQDCFFNIKLHPEDCKRFAFSVPSPNFKRPYQRFQWKVLPQGMKNSPTLCQKFVDKAILTVRDKYQDSYIVHYMDDILLAHPSRSIVDEILTSMIQALNKHGLVVSTEKIQKYDNLKYLGTHIQGDSVSYQKLQIRTDKLRTLNDFQKLLGNINWIRPFLKLTTGELKPLFEILNGDSNPISTRKLTPEACKALQLMNERLSTARVKRLDLSQPWSLCILKTEYTPTACLWQDGVVEWIHLPHISPKVITPYDIFCTQLIIKGRHRSKELFSKDPDYIVVPYTKVQFDLLLQEKEDWPISLLGFLGEVHFHLPKDPLLTFTLQTAIIFPHMTSTTPLEKGIVIFTDGSANGRSVTYIQGREPIIKENTQNTAQQAEIVAVITAFEEVSQPFNLYTDSKYVTGLFPEIETATLSPRTKIYTELKHLQRLIHKRQEKFYIGHIRGHTGLPGPLAQGNAYADSLTRILTAAGKRTADGSEFEKRTADGSEFESPKKKAKVE

SEQ ID NO: 7238 - protein, 2087 aa, synthetic construct
MPAAKRVKLDGGDKKYSIGLDIGTNSVGWAVITDEYKVPSKKFKVLGNTDRHSIKKNLIGALLFDSGETAEATRLKRTARRRYTRRKNRICYLQEIFSNEMAKVDDSFFHRLEESFLVEEDKKHERHPIFGNIVDEVAYHEKYPTIYHLRKKLVDSTDKADLRLIYLALAHMIKFRGHFLIEGDLNPDNSDVDKLFIQLVQTYNQLFEENPINASGVDAKAILSARLSKSRRLENLIAQLPGEKKNGLFGNLIALSLGLTPNFKSNFDLAEDAKLQLSKDTYDDDLDNLLAQIGDQYADLFLAAKNLSDAILLSDILRVNTEITKAPLSASMIKRYDEHHQDLTLLKALVRQQLPEKYKEIFFDQSKNGYAGYIDGGASQEEFYKFIKPILEKMDGTEELLVKLNREDLLRKQRTFDNGSIPHQIHLGELHAILRRQEDFYPFLKDNREKIEKILTFRIPYYVGPLARGNSRFAWMTRKSEETITPWNFEEVVDKGASAQSFIERMTNFDKNLPNEKVLPKHSLLYEYFTVYNELTKVKYVTEGMRKPAFLSGEQKKAIVDLLFKTNRKVTVKQLKEDYFKKIECFDSVEISGVEDRFNASLGTYHDLLKIIKDKDFLDNEENEDILEDIVLTLTLFEDREMIEERLKTYAHLFDDKVMKQLKRRRYTGWGRLSRKLINGIRDKQSGKTILDFLKSDGFANRNFMQLIHDDSLTFKEDIQKAQVSGQGDSLHEHIANLAGSPAIKKGILQTVKVVDELVKVMGRHKPENIVIEMARENQTTQKGQKNSRERMKRIEEGIKELGSQILKEHPVENTQLQNEKLYLYYLQNGRDMYVDQELDINRLSDYDVDHIVPQSFLKDDSIDNKVLTRSDKARGKSDNVPSEEVVKKMKNYWRQLLNAKLITQRKFDNLTKAERGGLSELDKAGFIKRQLVETRQITKHVAQILDSRMNTKYDENDKLIREVKVITLKSKLVSDFRKDFQFYKVREINNYHHAHDAYLNAVVGTALIKKYPKLESEFVYGDYKVYDVRKMIAKSEQEIGKATAKYFFYSNIMNFFKTEITLANGEIRKRPLIETNGETGEIVWDKGRDFATVRKVLSMPQVNIVKKTEVQTGGFSKESILPKRNSDKLIARKKDWDPKKYGGFDSPTVAYSVLVVAKVEKGKSKKLKSVKELLGITIMERSSFEKNPIDFLEAKGYKEVKKDLIIKLPKYSLFELENGRKRMLASAGELQKGNELALPSKYVNFLYLASHYEKLKGSPEDNEQKQLFVEQHKHYLDEIIEQISEFSKRVILADANLDKVLSAYNKHRDKPIREQAENIIHLFTLTNLGAPAAFKYFDTTIDRKRYTSTKEVLDATLIHQSITGLYETRIDLSQLGGDGGEAAAKPAPGGSGGIPWLMKKPLQLTTLVPLQEYEERLLKQTMLTGSYKEKLQSLFLKYDALWQHWENQVGHRRIKPHHIATGTVNPRPQKQYPINPKAKASIQTVINDLLKQGVLIQQNSIMNTPVYPVPKPDGKWRMVLDYREVNKTIPLIAAQNQHSAGILSSIFRGKYKTTLDLSNGFWAHSITPESYWLTAFTWLGQQYCWTRLPQGFLNSPALFNADVVDLLKEVPNVQVYVDDIYISHDDPREHLEQLEKVFSLLLNAGYVVSLKKSEIAQHEVEFLGFNITKEGRGLTETFKQKLLNITPPRDLKQLQSILGKLNFARNFIPNFSELVKPLYNIIATAPGKYITWTTDNSQQLQNIISMLNSAENLEERNPEVRLIMKVNTSPSAGYIRFYNEFAKRPIMYLNYVYTKAEVKFTNTEKLLTTIHKGLIKALDLGMGQEILVYSPIVSMTKIQKTPLPERKALPIRWITWMSYLEDPRIQFHYDKTLPELQQVPTVTDDIIAKIKHPSEFSMVFYTDGSAIKHPNVNKSHNAGMGIAQVQFKPEFTVINTWSIPLGDHTAQLAEVAAVEFACKKALKIDGPVLIVTDSFYVAESVNKELPYWQSNGFFNNKKKPLKHVSKWKSIADCIQLKPDIIIIHEKGHQPTASTFHTEGNNLADKLATQGSYVVNAGKRTADGSEFEKRTADGSEFESPKKKAKVE

SEQ ID NO: 7239 - protein, 2176 aa, synthetic construct
MPAAKRVKLDGGDKKYSIGLDIGTNSVGWAVITDEYKVPSKKFKVLGNTDRHSIKKNLIGALLFDSGETAEATRLKRTARRRYTRRKNRICYLQEIFSNEMAKVDDSFFHRLEESFLVEEDKKHERHPIFGNIVDEVAYHEKYPTIYHLRKKLVDSTDKADLRLIYLALAHMIKFRGHFLIEGDLNPDNSDVDKLFIQLVQTYNQLFEENPINASGVDAKAILSARLSKSRRLENLIAQLPGEKKNGLFGNLIALSLGLTPNFKSNFDLAEDAKLQLSKDTYDDDLDNLLAQIGDQYADLFLAAKNLSDAILLSDILRVNTEITKAPLSASMIKRYDEHHQDLTLLKALVRQQLPEKYKEIFFDQSKNGYAGYIDGGASQEEFYKFIKPILEKMDGTEELLVKLNREDLLRKQRTFDNGSIPHQIHLGELHAILRRQEDFYPFLKDNREKIEKILTFRIPYYVGPLARGNSRFAWMTRKSEETITPWNFEEVVDKGASAQSFIERMTNFDKNLPNEKVLPKHSLLYEYFTVYNELTKVKYVTEGMRKPAFLSGEQKKAIVDLLFKTNRKVTVKQLKEDYFKKIECFDSVEISGVEDRFNASLGTYHDLLKIIKDKDFLDNEENEDILEDIVLTLTLFEDREMIEERLKTYAHLFDDKVMKQLKRRRYTGWGRLSRKLINGIRDKQSGKTILDFLKSDGFANRNFMQLIHDDSLTFKEDIQKAQVSGQGDSLHEHIANLAGSPAIKKGILQTVKVVDELVKVMGRHKPENIVIEMARENQTTQKGQKNSRERMKRIEEGIKELGSQILKEHPVENTQLQNEKLYLYYLQNGRDMYVDQELDINRLSDYDVDHIVPQSFLKDDSIDNKVLTRSDKARGKSDNVPSEEVVKKMKNYWRQLLNAKLITQRKFDNLTKAERGGLSELDKAGFIKRQLVETRQITKHVAQILDSRMNTKYDENDKLIREVKVITLKSKLVSDFRKDFQFYKVREINNYHHAHDAYLNAVVGTALIKKYPKLESEFVYGDYKVYDVRKMIAKSEQEIGKATAKYFFYSNIMNFFKTEITLANGEIRKRPLIETNGETGEIVWDKGRDFATVRKVLSMPQVNIVKKTEVQTGGFSKESILPKRNSDKLIARKKDWDPKKYGGFDSPTVAYSVLVVAKVEKGKSKKLKSVKELLGITIMERSSFEKNPIDFLEAKGYKEVKKDLIIKLPKYSLFELENGRKRMLASAGELQKGNELALPSKYVNFLYLASHYEKLKGSPEDNEQKQLFVEQHKHYLDEIIEQISEFSKRVILADANLDKVLSAYNKHRDKPIREQAENIIHLFTLTNLGAPAAFKYFDTTIDRKRYTSTKEVLDATLIHQSITGLYETRIDLSQLGGDGGEAAAKPAPGGSGGMDPLQLLQPLEAEIKGTKLKAHWNSGATITCVPQAFLEEEVPIKNIWIKTIHGEKEQPVYYLTFKIQGRKVEAEVISSPYDYILVSPSDIPWLMKKPLQLTTLVPLQEYEERLLKQTMLTGSYKEKLQSLFLKYDALWQHWENQVGHRRIKPHHIATGTVNPRPQKQYPINPKAKASIQTVINDLLKQGVLIQQNSIMNTPVYPVPKPDGKWRMVLDYREVNKTIPLIAAQNQHSAGILSSIFRGKYKTTLDLSNGFWAHSITPESYWLTAFTWLGQQYCWTRLPQGFLNSPALFNADVVDLLKEVPNVQVYVDDIYISHDDPREHLEQLEKVFSLLLNAGYVVSLKKSEIAQHEVEFLGFNITKEGRGLTETFKQKLLNITPPRDLKQLQSILGLLNFARNFIPNFSELVKPLYNIIATAPGKYITWTTDNSQQLQNIISMLNSAENLEERNPEVRLIMKVNTSPSAGYIRFYNEFAKRPIMYLNYVYTKAEVKFTNTEKLLTTIHKGLIKALDLGMGQEILVYSPIVSMTKIQKTPLPERKALPIRWITWMSYLEDPRIQFHYDKTLPELQQVPTVTDDIIAKIKHPSEFSMVFYTDGSAIKHPNVNKSHNAGMGIAQVQFKPEFTVINTWSIPLGDHTAQLAEVAAVEFACKKALKIDGPVLIVTDSFYVAESVNKELPYWQSNGFFNNKKKPLKHVSKWKSIADCIQLKPDIIIIHEKGHQPTASTFHTEGNNLADKLATQGSYVVNAGKRTADGSEFEKRTADGSEFESPKKKAKVE

SEQ ID NO: 7240 - protein, 2094 aa, synthetic construct
MPAAKRVKLDGGDKKYSIGLDIGTNSVGWAVITDEYKVPSKKFKVLGNTDRHSIKKNLIGALLFDSGETAEATRLKRTARRRYTRRKNRICYLQEIFSNEMAKVDDSFFHRLEESFLVEEDKKHERHPIFGNIVDEVAYHEKYPTIYHLRKKLVDSTDKADLRLIYLALAHMIKFRGHFLIEGDLNPDNSDVDKLFIQLVQTYNQLFEENPINASGVDAKAILSARLSKSRRLENLIAQLPGEKKNGLFGNLIALSLGLTPNFKSNFDLAEDAKLQLSKDTYDDDLDNLLAQIGDQYADLFLAAKNLSDAILLSDILRVNTEITKAPLSASMIKRYDEHHQDLTLLKALVRQQLPEKYKEIFFDQSKNGYAGYIDGGASQEEFYKFIKPILEKMDGTEELLVKLNREDLLRKQRTFDNGSIPHQIHLGELHAILRRQEDFYPFLKDNREKIEKILTFRIPYYVGPLARGNSRFAWMTRKSEETITPWNFEEVVDKGASAQSFIERMTNFDKNLPNEKVLPKHSLLYEYFTVYNELTKVKYVTEGMRKPAFLSGEQKKAIVDLLFKTNRKVTVKQLKEDYFKKIECFDSVEISGVEDRFNASLGTYHDLLKIIKDKDFLDNEENEDILEDIVLTLTLFEDREMIEERLKTYAHLFDDKVMKQLKRRRYTGWGRLSRKLINGIRDKQSGKTILDFLKSDGFANRNFMQLIHDDSLTFKEDIQKAQVSGQGDSLHEHIANLAGSPAIKKGILQTVKVVDELVKVMGRHKPENIVIEMARENQTTQKGQKNSRERMKRIEEGIKELGSQILKEHPVENTQLQNEKLYLYYLQNGRDMYVDQELDINRLSDYDVDHIVPQSFLKDDSIDNKVLTRSDKARGKSDNVPSEEVVKKMKNYWRQLLNAKLITQRKFDNLTKAERGGLSELDKAGFIKRQLVETRQITKHVAQILDSRMNTKYDENDKLIREVKVITLKSKLVSDFRKDFQFYKVREINNYHHAHDAYLNAVVGTALIKKYPKLESEFVYGDYKVYDVRKMIAKSEQEIGKATAKYFFYSNIMNFFKTEITLANGEIRKRPLIETNGETGEIVWDKGRDFATVRKVLSMPQVNIVKKTEVQTGGFSKESILPKRNSDKLIARKKDWDPKKYGGFDSPTVAYSVLVVAKVEKGKSKKLKSVKELLGITIMERSSFEKNPIDFLEAKGYKEVKKDLIIKLPKYSLFELENGRKRMLASAGELQKGNELALPSKYVNFLYLASHYEKLKGSPEDNEQKQLFVEQHKHYLDEIIEQISEFSKRVILADANLDKVLSAYNKHRDKPIREQAENIIHLFTLTNLGAPAAFKYFDTTIDRKRYTSTKEVLDATLIHQSITGLYETRIDLSQLGGDGGEAAAKPAPGGSGGVLNLEEEYRLHEKPVPSSIDPSWLQLFPTVWAERAGMGLANQVPPVVVELRSGASPVAVRQYPMSKEAREGIRPHIQRFLDLGVLVPCQSPWNTPLLPVKKPGTNDYRPVQDLREINKRVQDIHPTVPNPYNLLSSLPPSHTWYSVLDLKDAFFCLKLHPNSQPLFAFEWRDPEKGNTGQLTWTRLPQGFKNSPTLFNEALHRDLAPFRALNPQVVLLQYVDDLLVAAPTYRDCKEGTQKLLQELSKLGYRVSAKKAQLCQKEVTYLGYLLKEGKRWLTPARKATVMKIPPPTTPRQVREFLGTAGFCRLWIPGFASLAAPLYPLTKPSIPFIWTEEHQKAFDRIKEALLSAPALALPDLTKPFTLYVDERAGVARGVLTQTLGPWRRPVAYLSKKLDPVASGWPTCLKAVAAVALLLKDADKLTLGQNVTVIASHSLESIVRQPPDRWMTNARMTHYQSLLLNERVSFAPPAVLNPATLLPVESEATPVHRCSEILAEETGTRRDLKDQPLPGVPAWYTDGSSFIAEGKRRAGAAIVDGKRTVWASSLPEGTSAQKAELVALTQALRLAEGKDINIYTDSRYAFATAHIHGAIYKQRGWLTSAGKDIKNKEEILALLEAIHLPKRVAIIHCPGHQKGNDPVATGNRRADEAAKQAALSTRVLAETTKPAGKRTADGSEFEKRTADGSEFESPKKKAKVE

SEQ ID NO: 7241 - protein, 2096 aa, synthetic construct
MPAAKRVKLDGGDKKYSIGLDIGTNSVGWAVITDEYKVPSKKFKVLGNTDRHSIKKNLIGALLFDSGETAEATRLKRTARRRYTRRKNRICYLQEIFSNEMAKVDDSFFHRLEESFLVEEDKKHERHPIFGNIVDEVAYHEKYPTIYHLRKKLVDSTDKADLRLIYLALAHMIKFRGHFLIEGDLNPDNSDVDKLFIQLVQTYNQLFEENPINASGVDAKAILSARLSKSRRLENLIAQLPGEKKNGLFGNLIALSLGLTPNFKSNFDLAEDAKLQLSKDTYDDDLDNLLAQIGDQYADLFLAAKNLSDAILLSDILRVNTEITKAPLSASMIKRYDEHHQDLTLLKALVRQQLPEKYKEIFFDQSKNGYAGYIDGGASQEEFYKFIKPILEKMDGTEELLVKLNREDLLRKQRTFDNGSIPHQIHLGELHAILRRQEDFYPFLKDNREKIEKILTFRIPYYVGPLARGNSRFAWMTRKSEETITPWNFEEVVDKGASAQSFIERMTNFDKNLPNEKVLPKHSLLYEYFTVYNELTKVKYVTEGMRKPAFLSGEQKKAIVDLLFKTNRKVTVKQLKEDYFKKIECFDSVEISGVEDRFNASLGTYHDLLKIIKDKDFLDNEENEDILEDIVLTLTLFEDREMIEERLKTYAHLFDDKVMKQLKRRRYTGWGRLSRKLINGIRDKQSGKTILDFLKSDGFANRNFMQLIHDDSLTFKEDIQKAQVSGQGDSLHEHIANLAGSPAIKKGILQTVKVVDELVKVMGRHKPENIVIEMARENQTTQKGQKNSRERMKRIEEGIKELGSQILKEHPVENTQLQNEKLYLYYLQNGRDMYVDQELDINRLSDYDVDHIVPQSFLKDDSIDNKVLTRSDKARGKSDNVPSEEVVKKMKNYWRQLLNAKLITQRKFDNLTKAERGGLSELDKAGFIKRQLVETRQITKHVAQILDSRMNTKYDENDKLIREVKVITLKSKLVSDFRKDFQFYKVREINNYHHAHDAYLNAVVGTALIKKYPKLESEFVYGDYKVYDVRKMIAKSEQEIGKATAKYFFYSNIMNFFKTEITLANGEIRKRPLIETNGETGEIVWDKGRDFATVRKVLSMPQVNIVKKTEVQTGGFSKESILPKRNSDKLIARKKDWDPKKYGGFDSPTVAYSVLVVAKVEKGKSKKLKSVKELLGITIMERSSFEKNPIDFLEAKGYKEVKKDLIIKLPKYSLFELENGRKRMLASAGELQKGNELALPSKYVNFLYLASHYEKLKGSPEDNEQKQLFVEQHKHYLDEIIEQISEFSKRVILADANLDKVLSAYNKHRDKPIREQAENIIHLFTLTNLGAPAAFKYFDTTIDRKRYTSTKEVLDATLIHQSITGLYETRIDLSQLGGDGGEAAAKPAPGGSGGTLNIEDEYRLHETSKEPDVPLGSTWLSDFPQAWAETGGMGLAVRQAPLIIPLKATSTPVSIKQYPMSQEARLGIKPHIQRLLDQGILVPCQSPWNTPLLPVKKPGTNDYRPVQDLREVNKRVEDIHPTVPNPYNLLSGLPPSHQWYTVLDLKDAFFCLRLHPTSQPLFAFEWRDPEMGISGQLTWTRLPQGFKNSPTLFDEALHRDLADFRIQHPDLILLQYVDDLLLAATSEQDCQRGTRALLQTLGNLGYRASAKKAQICQKQVKYLGYLLKEGQRWLTEARKETVMGQPTPKTPRQLREFLGTAGFCRLWIPGFAEMAAPLYPLTKTGTLFNWGPDQQKAYQEIKQALLTAPALGLPDLTKPFELFVDEKQGYAKGVLTQKLGPWRRPVAYLSKKLDPVAAGWPPCLRMVAAIAVLTKDAGKLTMGQPLVILAPHAVEALVKQPPDRWLSNARMTHYQAMLLDTDRVQFGPVVALNPATLLPLPEKEAPHDCLEILAETHGTRPDLTDQPIPDADYTWYTDGSSFLQEGQRRAGAAVTTETEVIWARALPAGTSAQRAELIALTQALKMAEGKKLNVYTDSRYAFATAHVHGEIYRRRGLLTSEGREIKNKNEILALLKALFLPKRLSIIHCPGHQKGNSAEARGNRMADQAAREAAMKAVLETSTLLAGKRTADGSEFEKRTADGSEFESPKKKAKVE

SEQ ID NO: 7242 - protein, 2096 aa, synthetic construct; identical to SEQ ID NO: 4527

SEQ ID NO: 7243 - protein, 2098 aa, synthetic construct
MPAAKRVKLDGGDKKYSIGLDIGTNSVGWAVITDEYKVPSKKFKVLGNTDRHSIKKNLIGALLFDSGETAEATRLKRTARRRYTRRKNRICYLQEIFSNEMAKVDDSFFHRLEESFLVEEDKKHERHPIFGNIVDEVAYHEKYPTIYHLRKKLVDSTDKADLRLIYLALAHMIKFRGHFLIEGDLNPDNSDVDKLFIQLVQTYNQLFEENPINASGVDAKAILSARLSKSRRLENLIAQLPGEKKNGLFGNLIALSLGLTPNFKSNFDLAEDAKLQLSKDTYDDDLDNLLAQIGDQYADLFLAAKNLSDAILLSDILRVNTEITKAPLSASMIKRYDEHHQDLTLLKALVRQQLPEKYKEIFFDQSKNGYAGYIDGGASQEEFYKFIKPILEKMDGTEELLVKLNREDLLRKQRTFDNGSIPHQIHLGELHAILRRQEDFYPFLKDNREKIEKILTFRIPYYVGPLARGNSRFAWMTRKSEETITPWNFEEVVDKGASAQSFIERMTNFDKNLPNEKVLPKHSLLYEYFTVYNELTKVKYVTEGMRKPAFLSGEQKKAIVDLLFKTNRKVTVKQLKEDYFKKIECFDSVEISGVEDRFNASLGTYHDLLKIIKDKDFLDNEENEDILEDIVLTLTLFEDREMIEERLKTYAHLFDDKVMKQLKRRRYTGWGRLSRKLINGIRDKQSGKTILDFLKSDGFANRNFMQLIHDDSLTFKEDIQKAQVSGQGDSLHEHIANLAGSPAIKKGILQTVKVVDELVKVMGRHKPENIVIEMARENQTTQKGQKNSRERMKRIEEGIKELGSQILKEHPVENTQLQNEKLYLYYLQNGRDMYVDQELDINRLSDYDVDHIVPQSFLKDDSIDNKVLTRSDKARGKSDNVPSEEVVKKMKNYWRQLLNAKLITQRKFDNLTKAERGGLSELDKAGFIKRQLVETRQITKHVAQILDSRMNTKYDENDKLIREVKVITLKSKLVSDFRKDFQFYKVREINNYHHAHDAYLNAVVGTALIKKYPKLESEFVYGDYKVYDVRKMIAKSEQEIGKATAKYFFYSNIMNFFKTEITLANGEIRKRPLIETNGETGEIVWDKGRDFATVRKVLSMPQVNIVKKTEVQTGGFSKESILPKRNSDKLIARKKDWDPKKYGGFDSPTVAYSVLVVAKVEKGKSKKLKSVKELLGITIMERSSFEKNPIDFLEAKGYKEVKKDLIIKLPKYSLFELENGRKRMLASAGELQKGNELALPSKYVNFLYLASHYEKLKGSPEDNEQKQLFVEQHKHYLDEIIEQISEFSKRVILADANLDKVLSAYNKHRDKPIREQAENIIHLFTLTNLGAPAAFKYFDTTIDRKRYTSTKEVLDATLIHQSITGLYETRIDLSQLGGDGGPAPGGSEAAAKGGTAPLEEEYRLFLEAPIQNVTLLEQWKREIPKVWAEINPPGLASTQAPIHVQLLSTALPVRVRQYPITLEAKRSLRETIRKFRAAGILRPVHSPWNTPLLPVRKSGTSEYRMVQDLREVNKRVETIHPTVPNPYTLLSLLPPDRIWYSVLDLKDAFFCIPLAPESQLIFAFEWADAEEGESGQLTWTRLPQGFKNSPTLFDEALNRDLQGFRLDHPSVSLLQYVDDLLIAADTQAACLSATRDLLMTLAELGYRVSGKKAQLCQEEVTYLGFKIHKGSRSLSNSRTQAILQIPVPKTKRQVREFLGTIGYCRLWIPGFAELAQPLYAATRGGNDPLVWGEKEEEAFQSLKLALTQPPALALPSLDKPFQLFVEETSGAAKGVLTQALGPWKRPVAYLSKRLDPVAAGWPRCLRAIAAAALLTREASKLTFGQDIEITSSHNLESLLRSPPDKWLTNARITQYQVLLLDPPRVRFKQTAALNPATLLPETDDTLPIHHCLDTLDSLTSTRPDLTDQPLAQAEATLFTDGSSYIRDGKRYAGAAVVTLDSVIWAEPLPIGTSAQKAELIALTKALEWSKDKSVNIYTDSRYAFATLHVHGMIYRERGLLTAGGKAIKNAPEILALLTAVWLPKRVAVMHCKGHQKDDAPTSTGNRRADEVAREVAIRPLSTQATISAGKRTADGSEFEKRTADGSEFESPKKKAKVE

SEQ ID NO: 7244 - protein, 2098 aa, synthetic construct
MPAAKRVKLDGGDKKYSIGLDIGTNSVGWAVITDEYKVPSKKFKVLGNTDRHSIKKNLIGALLFDSGETAEATRLKRTARRRYTRRKNRICYLQEIFSNEMAKVDDSFFHRLEESFLVEEDKKHERHPIFGNIVDEVAYHEKYPTIYHLRKKLVDSTDKADLRLIYLALAHMIKFRGHFLIEGDLNPDNSDVDKLFIQLVQTYNQLFEENPINASGVDAKAILSARLSKSRRLENLIAQLPGEKKNGLFGNLIALSLGLTPNFKSNFDLAEDAKLQLSKDTYDDDLDNLLAQIGDQYADLFLAAKNLSDAILLSDILRVNTEITKAPLSASMIKRYDEHHQDLTLLKALVRQQLPEKYKEIFFDQSKNGYAGYIDGGASQEEFYKFIKPILEKMDGTEELLVKLNREDLLRKQRTFDNGSIPHQIHLGELHAILRRQEDFYPFLKDNREKIEKILTFRIPYYVGPLARGNSRFAWMTRKSEETITPWNFEEVVDKGASAQSFIERMTNFDKNLPNEKVLPKHSLLYEYFTVYNELTKVKYVTEGMRKPAFLSGEQKKAIVDLLFKTNRKVTVKQLKEDYFKKIECFDSVEISGVEDRFNASLGTYHDLLKIIKDKDFLDNEENEDILEDIVLTLTLFEDREMIEERLKTYAHLFDDKVMKQLKRRRYTGWGRLSRKLINGIRDKQSGKTILDFLKSDGFANRNFMQLIHDDSLTFKEDIQKAQVSGQGDSLHEHIANLAGSPAIKKGILQTVKVVDELVKVMGRHKPENIVIEMARENQTTQKGQKNSRERMKRIEEGIKELGSQILKEHPVENTQLQNEKLYLYYLQNGRDMYVDQELDINRLSDYDVDHIVPQSFLKDDSIDNKVLTRSDKARGKSDNVPSEEVVKKMKNYWRQLLNAKLITQRKFDNLTKAERGGLSELDKAGFIKRQLVETRQITKHVAQILDSRMNTKYDENDKLIREVKVITLKSKLVSDFRKDFQFYKVREINNYHHAHDAYLNAVVGTALIKKYPKLESEFVYGDYKVYDVRKMIAKSEQEIGKATAKYFFYSNIMNFFKTEITLANGEIRKRPLIETNGETGEIVWDKGRDFATVRKVLSMPQVNIVKKTEVQTGGFSKESILPKRNSDKLIARKKDWDPKKYGGFDSPTVAYSVLVVAKVEKGKSKKLKSVKELLGITIMERSSFEKNPIDFLEAKGYKEVKKDLIIKLPKYSLFELENGRKRMLASAGELQKGNELALPSKYVNFLYLASHYEKLKGSPEDNEQKQLFVEQHKHYLDEIIEQISEFSKRVILADANLDKVLSAYNKHRDKPIREQAENIIHLFTLTNLGAPAAFKYFDTTIDRKRYTSTKEVLDATLIHQSITGLYETRIDLSQLGGDGGPAPGGSEAAAKGGTAPLEEEYRLFLEAPIQNVTLLEQWKREIPKVWAEINPPGLASTQAPIHVQLLSTALPVRVRQYPITLEAKRSLRETIRKFRAAGILRPVHSPWNTPLLPVRKSGTSEYRMVQDLREVNKRVETIHPTVPNPYTLLSLLPPDRIWYSVLDLKDAFFCIPLAPESQLIFAFEWADAEEGESGQLTWTRLPQGFKNSPTLFNEALNRDLQGFRLDHPSVSLLQYVDDLLIAADTQAACLSATRDLLMTLAELGYRVSGKKAQLCQEEVTYLGFKIHKGSRSLSNSRTQAILQIPVPKTKRQVREFLGTIGYCRLWIPGFAELAQPLYAATRPGNDPLVWGEKEEEAFQSLKLALTQPPALALPSLDKPFQLFVEETSGAAKGVLTQALGPWKRPVAYLSKRLDPVAAGWPRCLRAIAAAALLTREASKLTFGQDIEITSSHNLESLLRSPPDKWLTNARITQYQVLLLDPPRVRFKQTAALNPATLLPETDDTLPIHHCLDTLDSLTSTRPDLTDQPLAQAEATLFTDGSSYIRDGKRYAGAAVVTLDSVIWAEPLPIGTSAQKAELIALTKALEWSKDKSVNIYTDSRYAFATLHVHGMIYRERGWLTAGGKAIKNAPEILALLTAVWLPKRVAVMHCKGHQKDDAPTSTGNRRADEVAREVAIRPLSTQATISAGKRTADGSEFEKRTADGSEFESPKKKAKVE

SEQ ID NO: 7245 - protein, 2095 aa, synthetic construct
MPAAKRVKLDGGDKKYSIGLDIGTNSVGWAVITDEYKVPSKKFKVLGNTDRHSIKKNLIGALLFDSGETAEATRLKRTARRRYTRRKNRICYLQEIFSNEMAKVDDSFFHRLEESFLVEEDKKHERHPIFGNIVDEVAYHEKYPTIYHLRKKLVDSTDKADLRLIYLALAHMIKFRGHFLIEGDLNPDNSDVDKLFIQLVQTYNQLFEENPINASGVDAKAILSARLSKSRRLENLIAQLPGEKKNGLFGNLIALSLGLTPNFKSNFDLAEDAKLQLSKDTYDDDLDNLLAQIGDQYADLFLAAKNLSDAILLSDILRVNTEITKAPLSASMIKRYDEHHQDLTLLKALVRQQLPEKYKEIFFDQSKNGYAGYIDGGASQEEFYKFIKPILEKMDGTEELLVKLNREDLLRKQRTFDNGSIPHQIHLGELHAILRRQEDFYPFLKDNREKIEKILTFRIPYYVGPLARGNSRFAWMTRKSEETITPWNFEEVVDKGASAQSFIERMTNFDKNLPNEKVLPKHSLLYEYFTVYNELTKVKYVTEGMRKPAFLSGEQKKAIVDLLFKTNRKVTVKQLKEDYFKKIECFDSVEISGVEDRFNASLGTYHDLLKIIKDKDFLDNEENEDILEDIVLTLTLFEDREMIEERLKTYAHLFDDKVMKQLKRRRYTGWGRLSRKLINGIRDKQSGKTILDFLKSDGFANRNFMQLIHDDSLTFKEDIQKAQVSGQGDSLHEHIANLAGSPAIKKGILQTVKVVDELVKVMGRHKPENIVIEMARENQTTQKGQKNSRERMKRIEEGIKELGSQILKEHPVENTQLQNEKLYLYYLQNGRDMYVDQELDINRLSDYDVDHIVPQSFLKDDSIDNKVLTRSDKARGKSDNVPSEEVVKKMKNYWRQLLNAKLITQRKFDNLTKAERGGLSELDKAGFIKRQLVETRQITKHVAQILDSRMNTKYDENDKLIREVKVITLKSKLVSDFRKDFQFYKVREINNYHHAHDAYLNAVVGTALIKKYPKLESEFVYGDYKVYDVRKMIAKSEQEIGKATAKYFFYSNIMNFFKTEITLANGEIRKRPLIETNGETGEIVWDKGRDFATVRKVLSMPQVNIVKKTEVQTGGFSKESILPKRNSDKLIARKKDWDPKKYGGFDSPTVAYSVLVVAKVEKGKSKKLKSVKELLGITIMERSSFEKNPIDFLEAKGYKEVKKDLIIKLPKYSLFELENGRKRMLASAGELQKGNELALPSKYVNFLYLASHYEKLKGSPEDNEQKQLFVEQHKHYLDEIIEQISEFSKRVILADANLDKVLSAYNKHRDKPIREQAENIIHLFTLTNLGAPAAFKYFDTTIDRKRYTSTKEVLDATLIHQSITGLYETRIDLSQLGGDGGPAPGGSEAAAKGGTLQLEEEYRLFEPESTQKQEMDIWLKNFPQAWAETGGMGTAHCQAPVLIQLKATATPISIRQYPMPHEAYQGIKPHIRRMLDQGILKPCQSPWNTPLLPVKKPGTEDYRPVQDLREVNKRVEDIHPTVPNPYNLLSTLPPSHPWYTVLDLKDAFFCLRLHSESQLLFAFEWRDPEIGLSGQLTWTRLPQGFKNSPTLFNEALHSDLADFRVRYPALVLLQYVDDLLLAAATRTECLEGTKALLETLGNKGYRASAKKAQICLQEVTYLGYSLKDGQRWLTKARKEAILSIPVPKNSRQVREFLGTAGYCRLWIPGFAELAAPLYPLTRPGTLFQWGTEQQLAFEDIKKALLSSPALGLPDITKPFELFIDENSGFAKGVLVQKLGPWKRPVAYLSKKLDTVASGWPPCLRMVAAIAILVKDAGKLTLGQPLTILTSHPVEALVRQPPNKWLSNARMTHYQAMLLDAERVHFGPTVSLNPATLLPLPSGGNHHDCLQILAETHGTRPDLTDQPLPDADLTWYTDGSSFIRNGEREAGAAVTTESEVIWAAPLPPGTSAQRAELIALTQALKMAEGKKLTVYTDSRYAFATTHVHGEIYRRRGWLTSEGKEIKNKNEILALLEALFLPKRLSIIHCPGHQKGDSPQAKGNRLADDTAKKAATETHSSLTVLPAGKRTADGSEFEKRTADGSEFESPKKKAKVE

SEQ ID NO: 7246 - protein, 2096 aa, synthetic construct
MPAAKRVKLDGGDKKYSIGLDIGTNSVGWAVITDEYKVPSKKFKVLGNTDRHSIKKNLIGALLFDSGETAEATRLKRTARRRYTRRKNRICYLQEIFSNEMAKVDDSFFHRLEESFLVEEDKKHERHPIFGNIVDEVAYHEKYPTIYHLRKKLVDSTDKADLRLIYLALAHMIKFRGHFLIEGDLNPDNSDVDKLFIQLVQTYNQLFEENPINASGVDAKAILSARLSKSRRLENLIAQLPGEKKNGLFGNLIALSLGLTPNFKSNFDLAEDAKLQLSKDTYDDDLDNLLAQIGDQYADLFLAAKNLSDAILLSDILRVNTEITKAPLSASMIKRYDEHHQDLTLLKALVRQQLPEKYKEIFFDQSKNGYAGYIDGGASQEEFYKFIKPILEKMDGTEELLVKLNREDLLRKQRTFDNGSIPHQIHLGELHAILRRQEDFYPFLKDNREKIEKILTFRIPYYVGPLARGNSRFAWMTRKSEETITPWNFEEVVDKGASAQSFIERMTNFDKNLPNEKVLPKHSLLYEYFTVYNELTKVKYVTEGMRKPAFLSGEQKKAIVDLLFKTNRKVTVKQLKEDYFKKIECFDSVEISGVEDRFNASLGTYHDLLKIIKDKDFLDNEENEDILEDIVLTLTLFEDREMIEERLKTYAHLFDDKVMKQLKRRRYTGWGRLSRKLINGIRDKQSGKTILDFLKSDGFANRNFMQLIHDDSLTFKEDIQKAQVSGQGDSLHEHIANLAGSPAIKKGILQTVKVVDELVKVMGRHKPENIVIEMARENQTTQKGQKNSRERMKRIEEGIKELGSQILKEHPVENTQLQNEKLYLYYLQNGRDMYVDQELDINRLSDYDVDHIVPQSFLKDDSIDNKVLTRSDKARGKSDNVPSEEVVKKMKNYWRQLLNAKLITQRKFDNLTKAERGGLSELDKAGFIKRQLVETRQITKHVAQILDSRMNTKYDENDKLIREVKVITLKSKLVSDFRKDFQFYKVREINNYHHAHDAYLNAVVGTALIKKYPKLESEFVYGDYKVYDVRKMIAKSEQEIGKATAKYFFYSNIMNFFKTEITLANGEIRKRPLIETNGETGEIVWDKGRDFATVRKVLSMPQVNIVKKTEVQTGGFSKESILPKRNSDKLIARKKDWDPKKYGGFDSPTVAYSVLVVAKVEKGKSKKLKSVKELLGITIMERSSFEKNPIDFLEAKGYKEVKKDLIIKLPKYSLFELENGRKRMLASAGELQKGNELALPSKYVNFLYLASHYEKLKGSPEDNEQKQLFVEQHKHYLDEIIEQISEFSKRVILADANLDKVLSAYNKHRDKPIREQAENIIHLFTLTNLGAPAAFKYFDTTIDRKRYTSTKEVLDATLIHQSITGLYETRIDLSQLGGDGGPAPGGSEAAAKGGTLGIEDEYRLHETSTEPDVSLGSTWLSDFPQAWAETGGMGLAVRQAPLIIPLKATSTPVSIQQYPMSHEARLGIKPHIQRLLDQGILVPCQSPWNTPLLPVKKPGTNDYRPVQDLREVNKRVEDIHPTVPNPYNLLSGLPPSHQWYTVLDLKDAFFCLRLHPTSQPLFAFEWRDPGMGISGQLTWTRLPQGFKNSPTLFNEALHRDLADFRIQHPDLILLQYVDDILLAATSELDCQQGTRALLQTLGDLGYRASAKKAQICQKQVKYLGYLLREGQRWLTEARKETVMGQPVPKTPRQLREFLGTAGFCRLWIPGFAEMAAPLYPLTKPGTLFSWGPDQQKAYQEIKQALLTAPALGLPDLTKPFELFVDEKQGYAKGVLTQKLGPWRRPVAYLSKKLDPVAAGWPPCLRMVAAIAVLTKDAGKLTMGQPLVILAPHAVEALVKQPPDRWLSNARMTHYQAMLLDTDRVQFGPVVALNPATLLPLPEEGAPHDCLEILAETHGTRPDLTDQPIPDADHTWYTDGSSFLQEGQRKAGAAVTTETEVIWAGALPAGTSAQRAELIALTQALKMAEGKRLNVYTDSRYAFATAHIHGEIYRRRGWLTSEGREIKNKSEILALLKALFLPKRLSIIHCLGHQKGDSAEARGNRLADQAAREAAIKTPPDTSTLLAGKRTADGSEFEKRTADGSEFESPKKKAKVE

SEQ ID NO: 7247 - protein, 2096 aa, synthetic construct
MPAAKRVKLDGGDKKYSIGLDIGTNSVGWAVITDEYKVPSKKFKVLGNTDRHSIKKNLIGALLFDSGETAEATRLKRTARRRYTRRKNRICYLQEIFSNEMAKVDDSFFHRLEESFLVEEDKKHERHPIFGNIVDEVAYHEKYPTIYHLRKKLVDSTDKADLRLIYLALAHMIKFRGHFLIEGDLNPDNSDVDKLFIQLVQTYNQLFEENPINASGVDAKAILSARLSKSRRLENLIAQLPGEKKNGLFGNLIALSLGLTPNFKSNFDLAEDAKLQLSKDTYDDDLDNLLAQIGDQYADLFLAAKNLSDAILLSDILRVNTEITKAPLSASMIKRYDEHHQDLTLLKALVRQQLPEKYKEIFFDQSKNGYAGYIDGGASQEEFYKFIKPILEKMDGTEELLVKLNREDLLRKQRTFDNGSIPHQIHLGELHAILRRQEDFYPFLKDNREKIEKILTFRIPYYVGPLARGNSRFAWMTRKSEETITPWNFEEVVDKGASAQSFIERMTNFDKNLPNEKVLPKHSLLYEYFTVYNELTKVKYVTEGMRKPAFLSGEQKKAIVDLLFKTNRKVTVKQLKEDYFKKIECFDSVEISGVEDRFNASLGTYHDLLKIIKDKDFLDNEENEDILEDIVLTLTLFEDREMIEERLKTYAHLFDDKVMKQLKRRRYTGWGRLSRKLINGIRDKQSGKTILDFLKSDGFANRNFMQLIHDDSLTFKEDIQKAQVSGQGDSLHEHIANLAGSPAIKKGILQTVKVVDELVKVMGRHKPENIVIEMARENQTTQKGQKNSRERMKRIEEGIKELGSQILKEHPVENTQLQNEKLYLYYLQNGRDMYVDQELDINRLSDYDVDHIVPQSFLKDDSIDNKVLTRSDKARGKSDNVPSEEVVKKMKNYWRQLLNAKLITQRKFDNLTKAERGGLSELDKAGFIKRQLVETRQITKHVAQILDSRMNTKYDENDKLIREVKVITLKSKLVSDFRKDFQFYKVREINNYHHAHDAYLNAVVGTALIKKYPKLESEFVYGDYKVYDVRKMIAKSEQEIGKATAKYFFYSNIMNFFKTEITLANGEIRKRPLIETNGETGEIVWDKGRDFATVRKVLSMPQVNIVKKTEVQTGGFSKESILPKRNSDKLIARKKDWDPKKYGGFDSPTVAYSVLVVAKVEKGKSKKLKSVKELLGITIMERSSFEKNPIDFLEAKGYKEVKKDLIIKLPKYSLFELENGRKRMLASAGELQKGNELALPSKYVNFLYLASHYEKLKGSPEDNEQKQLFVEQHKHYLDEIIEQISEFSKRVILADANLDKVLSAYNKHRDKPIREQAENIIHLFTLTNLGAPAAFKYFDTTIDRKRYTSTKEVLDATLIHQSITGLYETRIDLSQLGGDGGPAPGGSEAAAKGGTLNIEDEYRLHETSKGPDVPLGSTWLSDFPQAWAETGGMGLAVRQAPLIIPLKATSTPVSIKQYPMSQEARLGIKPHIQRLLDQGILVPCQSPWNTPLLPVKKPGTNDYRPVQDLREVNKRVEDIHPTVPNPYNLLSGLPPSHQWYTVLDLKDAFFCLRLHPTSQSLFAFEWRDPEMGISGQLTWTRLPQGFKNSPTLFDEALHRDLADFRIQHPDLILLQYVDDLLLAATSELDCQQGTRALLQTLGDLGYRASAKKAQICQKQVKYLGYLLKEGQRWLTEARKETVMGQPTPKTPRQLREFLGTAGFCRLWIPGFAEMAAPLYPLTKTGTLFEWGPDQQKAYQEIKQALLTAPALGLPDLTKPFELFVDEKQGYAKGVLTQKLGPWRRPVAYLSKKLDPVAAGWPPCLRMVAAIAVLTKDAGKLTMGQPLVILAPHAVEALVKQPPDRWLSNARMTHYQALLLDTDRVQFGPIVALNPATLLPLPEEGLQHDCLDILAEAHGTRPDLTDQPLPDADHTWYTDGSSFLQEGQRKAGAAVTTETEVVWAKALPAGTSAQRAELIALTQALKMAEGKKLNVYTDSRYAFATAHIHGEIYRRRGLLTSEGKEIKNKDEILALLKALFLPKRLSIIHCPGHQKGNRAEARGNRMADQAAREVATRETPETSTLLAGKRTADGSEFEKRTADGSEFESPKKKAKVE

SEQ ID NO: 7248 - protein, 2090 aa, synthetic construct
MPAAKRVKLDGGDKKYSIGLDIGTNSVGWAVITDEYKVPSKKFKVLGNTDRHSIKKNLIGALLFDSGETAEATRLKRTARRRYTRRKNRICYLQEIFSNEMAKVDDSFFHRLEESFLVEEDKKHERHPIFGNIVDEVAYHEKYPTIYHLRKKLVDSTDKADLRLIYLALAHMIKFRGHFLIEGDLNPDNSDVDKLFIQLVQTYNQLFEENPINASGVDAKAILSARLSKSRRLENLIAQLPGEKKNGLFGNLIALSLGLTPNFKSNFDLAEDAKLQLSKDTYDDDLDNLLAQIGDQYADLFLAAKNLSDAILLSDILRVNTEITKAPLSASMIKRYDEHHQDLTLLKALVRQQLPEKYKEIFFDQSKNGYAGYIDGGASQEEFYKFIKPILEKMDGTEELLVKLNREDLLRKQRTFDNGSIPHQIHLGELHAILRRQEDFYPFLKDNREKIEKILTFRIPYYVGPLARGNSRFAWMTRKSEETITPWNFEEVVDKGASAQSFIERMTNFDKNLPNEKVLPKHSLLYEYFTVYNELTKVKYVTEGMRKPAFLSGEQKKAIVDLLFKTNRKVTVKQLKEDYFKKIECFDSVEISGVEDRFNASLGTYHDLLKIIKDKDFLDNEENEDILEDIVLTLTLFEDREMIEERLKTYAHLFDDKVMKQLKRRRYTGWGRLSRKLINGIRDKQSGKTILDFLKSDGFANRNFMQLIHDDSLTFKEDIQKAQVSGQGDSLHEHIANLAGSPAIKKGILQTVKVVDELVKVMGRHKPENIVIEMARENQTTQKGQKNSRERMKRIEEGIKELGSQILKEHPVENTQLQNEKLYLYYLQNGRDMYVDQELDINRLSDYDVDHIVPQSFLKDDSIDNKVLTRSDKARGKSDNVPSEEVVKKMKNYWRQLLNAKLITQRKFDNLTKAERGGLSELDKAGFIKRQLVETRQITKHVAQILDSRMNTKYDENDKLIREVKVITLKSKLVSDFRKDFQFYKVREINNYHHAHDAYLNAVVGTALIKKYPKLESEFVYGDYKVYDVRKMIAKSEQEIGKATAKYFFYSNIMNFFKTEITLANGEIRKRPLIETNGETGEIVWDKGRDFATVRKVLSMPQVNIVKKTEVQTGGFSKESILPKRNSDKLIARKKDWDPKKYGGFDSPTVAYSVLVVAKVEKGKSKKLKSVKELLGITIMERSSFEKNPIDFLEAKGYKEVKKDLIIKLPKYSLFELENGRKRMLASAGELQKGNELALPSKYVNFLYLASHYEKLKGSPEDNEQKQLFVEQHKHYLDEIIEQISEFSKRVILADANLDKVLSAYNKHRDKPIREQAENIIHLFTLTNLGAPAAFKYFDTTIDRKRYTSTKEVLDATLIHQSITGLYETRIDLSQLGGDGGPAPGGSEAAAKGGTLQLDDEYRLYSPLVKPDQNIQFWLEQFPQAWAETAGMGLAKQVPPQVIQLKASATPVSVRQYPLSKEAQEGIRPHVQRLIQQGILVPVQSPWNTPLLPVRKPGTNDYRPVQDLREVNKRVQDIHPTVPNPYNLLCALPPQRSWYTVLDLKDAFFCLRLHPTSQPLFAFEWRDPGTGRTGQLTWTRLPQGFKNSPTIFDEALHRDLANFRIQHPQVTLLQYVDDLLLAGATKQDCLEGTKALLLELSDLGYRASAKKAQICRREVTYLGYSLRDGQRWLTEARKKTVVQIPAPTTAKQVREFLGTAGFCRLWIPGFATLAAPLYPLTKEKGEFSWAPEHQKAFDAIKKALLSAPALALPDVTKPFTLYVDERKGVARGVLTQTLGPWRRPVAYLSKKLDPVASGWPVCLKAIAAVAILVKDADKLTLGQNITVIAPHALENIVRQPPDRWMTNARMTHYQSLLLTERVTFAPPAALNPATLLPEETDEPVTHDCHQLLIEETGVRKDLTDIPLTGEVLTWFTDGSSYVVEGKRMAGAAVVDGTRTIWASSLPEGTSAQKAELMALTQALRLAEGKSINIYTDSRYAFATAHVHGAIYKQRGLLTSAGREIKNKEEILSLLEALHLPKRLAIIHCPGHQKAKDPISRGNQMADRVAKQAAQGVNLLAGKRTADGSEFEKRTADGSEFESPKKKAKVE

SEQ ID NO: 7249 - protein, 2176 aa, synthetic construct
MPAAKRVKLDGGDKKYSIGLDIGTNSVGWAVITDEYKVPSKKFKVLGNTDRHSIKKNLIGALLFDSGETAEATRLKRTARRRYTRRKNRICYLQEIFSNEMAKVDDSFFHRLEESFLVEEDKKHERHPIFGNIVDEVAYHEKYPTIYHLRKKLVDSTDKADLRLIYLALAHMIKFRGHFLIEGDLNPDNSDVDKLFIQLVQTYNQLFEENPINASGVDAKAILSARLSKSRRLENLIAQLPGEKKNGLFGNLIALSLGLTPNFKSNFDLAEDAKLQLSKDTYDDDLDNLLAQIGDQYADLFLAAKNLSDAILLSDILRVNTEITKAPLSASMIKRYDEHHQDLTLLKALVRQQLPEKYKEIFFDQSKNGYAGYIDGGASQEEFYKFIKPILEKMDGTEELLVKLNREDLLRKQRTFDNGSIPHQIHLGELHAILRRQEDFYPFLKDNREKIEKILTFRIPYYVGPLARGNSRFAWMTRKSEETITPWNFEEVVDKGASAQSFIERMTNFDKNLPNEKVLPKHSLLYEYFTVYNELTKVKYVTEGMRKPAFLSGEQKKAIVDLLFKTNRKVTVKQLKEDYFKKIECFDSVEISGVEDRFNASLGTYHDLLKIIKDKDFLDNEENEDILEDIVLTLTLFEDREMIEERLKTYAHLFDDKVMKQLKRRRYTGWGRLSRKLINGIRDKQSGKTILDFLKSDGFANRNFMQLIHDDSLTFKEDIQKAQVSGQGDSLHEHIANLAGSPAIKKGILQTVKVVDELVKVMGRHKPENIVIEMARENQTTQKGQKNSRERMKRIEEGIKELGSQILKEHPVENTQLQNEKLYLYYLQNGRDMYVDQELDINRLSDYDVDHIVPQSFLKDDSIDNKVLTRSDKARGKSDNVPSEEVVKKMKNYWRQLLNAKLITQRKFDNLTKAERGGLSELDKAGFIKRQLVETRQITKHVAQILDSRMNTKYDENDKLIREVKVITLKSKLVSDFRKDFQFYKVREINNYHHAHDAYLNAVVGTALIKKYPKLESEFVYGDYKVYDVRKMIAKSEQEIGKATAKYFFYSNIMNFFKTEITLANGEIRKRPLIETNGETGEIVWDKGRDFATVRKVLSMPQVNIVKKTEVQTGGFSKESILPKRNSDKLIARKKDWDPKKYGGFDSPTVAYSVLVVAKVEKGKSKKLKSVKELLGITIMERSSFEKNPIDFLEAKGYKEVKKDLIIKLPKYSLFELENGRKRMLASAGELQKGNELALPSKYVNFLYLASHYEKLKGSPEDNEQKQLFVEQHKHYLDEIIEQISEFSKRVILADANLDKVLSAYNKHRDKPIREQAENIIHLFTLTNLGAPAAFKYFDTTIDRKRYTSTKEVLDATLIHQSITGLYETRIDLSQLGGDGGPAPGGSEAAAKGGMDPLQLLQPLEAEIKGTKLKAHWNSGATITCVPEAFLEDERPIQTMLIKTIHGEKQQDVYYLTFKVQGRKVEAEVLASPYDYILLNPSDVPWLMKKPLQLTVLVPLHEYQERLLQQTALPKEQKELLQKLFLKYDALWQHWENQVGHRRIKPHNIATGTLAPRPQKQYPINPKAKPSIQIVIDDLLKQGVLIQQNSTMNTPVYPVPKPDGKWRMVLDYREVNKTIPLIAAQNQHSAGILSSIYRGKYKTTLDLTNGFWAHPITPESYWLTAFTWQGKQYCWTRLPQGFLNSPALFTADVVDLLKEIPNVQAYVDDIYISHDDPQEHLEQLEKIFSILLNAGYVVSLKKSEIAQREVEFLGFNITKEGRGLTDTFKQKLLNITPPKDLKQLQSILGLLNFARNFIPNYSELVKPLYTIVANANGKFISWTEDNSNQLQHIISVLNQADNLEERNPETRLIIKVNSSPSAGYIRYYNEGSKRPIMYVNYIFSKAEAKFTQTEKLLTTMHKGLIKAMDLAMGQEILVYSPIVSMTKIQRTPLPERKALPVRWITWMTYLEDPRIQFHYDKSLPELQQIPNVTEDVIAKTKHPSEFAMVFYTDGSAIKHPDVNKSHSAGMGIAQVQFIPEYKIVHQWSIPLGDHTAQLAEIAAVEFACKKALKISGPVLIVTDSFYVAESANKELPYWKSNGFLNNKKKPLRHVSKWKSIAECLQLKPDIIIMHEKGHQQPMTTLHTEGNNLADKLATQGSYVVHAGKRTADGSEFEKRTADGSEFESPKKKAKVE

SEQ ID NO: 7250 - protein, 2094 aa, synthetic construct
MPAAKRVKLDGGDKKYSIGLDIGTNSVGWAVITDEYKVPSKKFKVLGNTDRHSIKKNLIGALLFDSGETAEATRLKRTARRRYTRRKNRICYLQEIFSNEMAKVDDSFFHRLEESFLVEEDKKHERHPIFGNIVDEVAYHEKYPTIYHLRKKLVDSTDKADLRLIYLALAHMIKFRGHFLIEGDLNPDNSDVDKLFIQLVQTYNQLFEENPINASGVDAKAILSARLSKSRRLENLIAQLPGEKKNGLFGNLIALSLGLTPNFKSNFDLAEDAKLQLSKDTYDDDLDNLLAQIGDQYADLFLAAKNLSDAILLSDILRVNTEITKAPLSASMIKRYDEHHQDLTLLKALVRQQLPEKYKEIFFDQSKNGYAGYIDGGASQEEFYKFIKPILEKMDGTEELLVKLNREDLLRKQRTFDNGSIPHQIHLGELHAILRRQEDFYPFLKDNREKIEKILTFRIPYYVGPLARGNSRFAWMTRKSEETITPWNFEEVVDKGASAQSFIERMTNFDKNLPNEKVLPKHSLLYEYFTVYNELTKVKYVTEGMRKPAFLSGEQKKAIVDLLFKTNRKVTVKQLKEDYFKKIECFDSVEISGVEDRFNASLGTYHDLLKIIKDKDFLDNEENEDILEDIVLTLTLFEDREMIEERLKTYAHLFDDKVMKQLKRRRYTGWGRLSRKLINGIRDKQSGKTILDFLKSDGFANRNFMQLIHDDSLTFKEDIQKAQVSGQGDSLHEHIANLAGSPAIKKGILQTVKVVDELVKVMGRHKPENIVIEMARENQTTQKGQKNSRERMKRIEEGIKELGSQILKEHPVENTQLQNEKLYLYYLQNGRDMYVDQELDINRLSDYDVDHIVPQSFLKDDSIDNKVLTRSDKARGKSDNVPSEEVVKKMKNYWRQLLNAKLITQRKFDNLTKAERGGLSELDKAGFIKRQLVETRQITKHVAQILDSRMNTKYDENDKLIREVKVITLKSKLVSDFRKDFQFYKVREINNYHHAHDAYLNAVVGTALIKKYPKLESEFVYGDYKVYDVRKMIAKSEQEIGKATAKYFFYSNIMNFFKTEITLANGEIRKRPLIETNGETGEIVWDKGRDFATVRKVLSMPQVNIVKKTEVQTGGFSKESILPKRNSDKLIARKKDWDPKKYGGFDSPTVAYSVLVVAKVEKGKSKKLKSVKELLGITIMERSSFEKNPIDFLEAKGYKEVKKDLIIKLPKYSLFELENGRKRMLASAGELQKGNELALPSKYVNFLYLASHYEKLKGSPEDNEQKQLFVEQHKHYLDEIIEQISEFSKRVILADANLDKVLSAYNKHRDKPIREQAENIIHLFTLTNLGAPAAFKYFDTTIDRKRYTSTKEVLDATLIHQSITGLYETRIDLSQLGGDGGPAPGGSEAAAKGGVLNLEEEYRLHEKPVPSSIDPSWLQLFPTVWAERAGMGLANQVPPVVVELRSGASPVAVRQYPMSKEAREGIRPHIQRFLDLGVLVPCQSPWNTPLLPVKKPGTNDYRPVQDLREINKRVQDIHPTVPNPYNLLSSLPPSHTWYSVLDLKDAFFCLKLHPNSQPLFAFEWRDPEKGNTGQLTWTRLPQGFKNSPTLFNEALHRDLAPFRALNPQVVLLQYVDDLLVAAPTYRDCKEGTQKLLQELSKLGYRVSAKKAQLCQKEVTYLGYLLKEGKRWLTPARKATVMKIPPPTTPRQVREFLGKAGFCRLFIPGFASLAAPLYPLTKPSIPFIWTEEHQKAFDRIKEALLSAPALALPDLTKPFTLYVDERAGVARGVLTQTLGPWRRPVAYLSKKLDPVASGWPTCLKAVAAVALLLKDADKLTLGQNVTVIASHSLESIVRQPPDRWMTNARMTHYQSLLLNERVSFAPPAVLNPATLLPVESEATPVHRCSEILAEETGTRRDLKDQPLPGVPAWYTDGSSFIAEGKRRAGAAIVDGKRTVWASSLPEGTSAQKAELVALTQALRLAEGKDINIYTDSRYAFATAHIHGAIYKQRGWLTSAGKDIKNKEEILALLEAIHLPKRVAIIHCPGHQKGNDPVATGNRRADEAAKQAALSTRVLAETTKPAGKRTADGSEFEKRTADGSEFESPKKKAKVE

SEQ ID NO: 7251 - protein, 2096 aa, synthetic construct
MPAAKRVKLDGGDKKYSIGLDIGTNSVGWAVITDEYKVPSKKFKVLGNTDRHSIKKNLIGALLFDSGETAEATRLKRTARRRYTRRKNRICYLQEIFSNEMAKVDDSFFHRLEESFLVEEDKKHERHPIFGNIVDEVAYHEKYPTIYHLRKKLVDSTDKADLRLIYLALAHMIKFRGHFLIEGDLNPDNSDVDKLFIQLVQTYNQLFEENPINASGVDAKAILSARLSKSRRLENLIAQLPGEKKNGLFGNLIALSLGLTPNFKSNFDLAEDAKLQLSKDTYDDDLDNLLAQIGDQYADLFLAAKNLSDAILLSDILRVNTEITKAPLSASMIKRYDEHHQDLTLLKALVRQQLPEKYKEIFFDQSKNGYAGYIDGGASQEEFYKFIKPILEKMDGTEELLVKLNREDLLRKQRTFDNGSIPHQIHLGELHAILRRQEDFYPFLKDNREKIEKILTFRIPYYVGPLARGNSRFAWMTRKSEETITPWNFEEVVDKGASAQSFIERMTNFDKNLPNEKVLPKHSLLYEYFTVYNELTKVKYVTEGMRKPAFLSGEQKKAIVDLLFKTNRKVTVKQLKEDYFKKIECFDSVEISGVEDRFNASLGTYHDLLKIIKDKDFLDNEENEDILEDIVLTLTLFEDREMIEERLKTYAHLFDDKVMKQLKRRRYTGWGRLSRKLINGIRDKQSGKTILDFLKSDGFANRNFMQLIHDDSLTFKEDIQKAQVSGQGDSLHEHIANLAGSPAIKKGILQTVKVVDELVKVMGRHKPENIVIEMARENQTTQKGQKNSRERMKRIEEGIKELGSQILKEHPVENTQLQNEKLYLYYLQNGRDMYVDQELDINRLSDYDVDHIVPQSFLKDDSIDNKVLTRSDKARGKSDNVPSEEVVKKMKNYWRQLLNAKLITQRKFDNLTKAERGGLSELDKAGFIKRQLVETRQITKHVAQILDSRMNTKYDENDKLIREVKVITLKSKLVSDFRKDFQFYKVREINNYHHAHDAYLNAVVGTALIKKYPKLESEFVYGDYKVYDVRKMIAKSEQEIGKATAKYFFYSNIMNFFKTEITLANGEIRKRPLIETNGETGEIVWDKGRDFATVRKVLSMPQVNIVKKTEVQTGGFSKESILPKRNSDKLIARKKDWDPKKYGGFDSPTVAYSVLVVAKVEKGKSKKLKSVKELLGITIMERSSFEKNPIDFLEAKGYKEVKKDLIIKLPKYSLFELENGRKRMLASAGELQKGNELALPSKYVNFLYLASHYEKLKGSPEDNEQKQLFVEQHKHYLDEIIEQISEFSKRVILADANLDKVLSAYNKHRDKPIREQAENIIHLFTLTNLGAPAAFKYFDTTIDRKRYTSTKEVLDATLIHQSITGLYETRIDLSQLGGDGGPAPGGSEAAAKGGTLNIEDEYRLHETSKEPDVPLGSTWLSDFPQAWAETGGMGLAVRQAPLIIPLKATSTPVSIKQYPMSQEARLGIKPHIQRLLDQGILVPCQSPWNTPLLPVKKPGTNDYRPVQDLREVNKRVEDIHPTVPNPYNLLSGLPPSHQWYTVLDLKDAFFCLRLHPTSQPLFAFEWRDPEMGISGQLTWTRLPQGFKNSPTLFDEALHRDLADFRIQHPDLILLQYVDDLLLAATSEQDCQRGTRALLQTLGNLGYRASAKKAQICQKQVKYLGYLLKEGQRWLTEARKETVMGQPTPKTPRQLREFLGTAGFCRLWIPGFAEMAAPLYPLTKTGTLFNWGPDQQKAYQEIKQALLTAPALGLPDLTKPFELFVDEKQGYAKGVLTQKLGPWRRPVAYLSKKLDPVAAGWPPCLRMVAAIAVLTKDAGKLTMGQPLVILAPHAVEALVKQPPDRWLSNARMTHYQAMLLDTDRVQFGPVVALNPATLLPLPEKEAPHDCLEILAETHGTRPDLTDQPIPDADYTWYTDGSSFLQEGQRRAGAAVTTETEVIWARALPAGTSAQRAELIALTQALKMAEGKKLNVYTDSRYAFATAHVHGEIYRRRGLLTSEGREIKNKNEILALLKALFLPKRLSIIHCPGHQKGNSAEARGNRMADQAAREAAMKAVLETSTLLAGKRTADGSEFEKRTADGSEFESPKKKAKVE

SEQ ID NO: 7252 - protein, 2096 aa, synthetic construct
MPAAKRVKLDGGDKKYSIGLDIGTNSVGWAVITDEYKVPSKKFKVLGNTDRHSIKKNLIGALLFDSGETAEATRLKRTARRRYTRRKNRICYLQEIFSNEMAKVDDSFFHRLEESFLVEEDKKHERHPIFGNIVDEVAYHEKYPTIYHLRKKLVDSTDKADLRLIYLALAHMIKFRGHFLIEGDLNPDNSDVDKLFIQLVQTYNQLFEENPINASGVDAKAILSARLSKSRRLENLIAQLPGEKKNGLFGNLIALSLGLTPNFKSNFDLAEDAKLQLSKDTYDDDLDNLLAQIGDQYADLFLAAKNLSDAILLSDILRVNTEITKAPLSASMIKRYDEHHQDLTLLKALVRQQLPEKYKEIFFDQSKNGYAGYIDGGASQEEFYKFIKPILEKMDGTEELLVKLNREDLLRKQRTFDNGSIPHQIHLGELHAILRRQEDFYPFLKDNREKIEKILTFRIPYYVGPLARGNSRFAWMTRKSEETITPWNFEEVVDKGASAQSFIERMTNFDKNLPNEKVLPKHSLLYEYFTVYNELTKVKYVTEGMRKPAFLSGEQKKAIVDLLFKTNRKVTVKQLKEDYFKKIECFDSVEISGVEDRFNASLGTYHDLLKIIKDKDFLDNEENEDILEDIVLTLTLFEDREMIEERLKTYAHLFDDKVMKQLKRRRYTGWGRLSRKLINGIRDKQSGKTILDFLKSDGFANRNFMQLIHDDSLTFKEDIQKAQVSGQGDSLHEHIANLAGSPAIKKGILQTVKVVDELVKVMGRHKPENIVIEMARENQTTQKGQKNSRERMKRIEEGIKELGSQILKEHPVENTQLQNEKLYLYYLQNGRDMYVDQELDINRLSDYDVDHIVPQSFLKDDSIDNKVLTRSDKARGKSDNVPSEEVVKKMKNYWRQLLNAKLITQRKFDNLTKAERGGLSELDKAGFIKRQLVETRQITKHVAQILDSRMNTKYDENDKLIREVKVITLKSKLVSDFRKDFQFYKVREINNYHHAHDAYLNAVVGTALIKKYPKLESEFVYGDYKVYDVRKMIAKSEQEIGKATAKYFFYSNIMNFFKTEITLANGEIRKRPLIETNGETGEIVWDKGRDFATVRKVLSMPQVNIVKKTEVQTGGFSKESILPKRNSDKLIARKKDWDPKKYGGFDSPTVAYSVLVVAKVEKGKSKKLKSVKELLGITIMERSSFEKNPIDFLEAKGYKEVKKDLIIKLPKYSLFELENGRKRMLASAGELQKGNELALPSKYVNFLYLASHYEKLKGSPEDNEQKQLFVEQHKHYLDEIIEQISEFSKRVILADANLDKVLSAYNKHRDKPIREQAENIIHLFTLTNLGAPAAFKYFDTTIDRKRYTSTKEVLDATLIHQSITGLYETRIDLSQLGGDGGPAPGGSEAAAKGGTLNIEDEYRLHETSKEPDVPLGSTWLSDFPQAWAETGGMGLAVRQAPLIIPLKATSTPVSIKQYPMSQEARLGIKPHIQRLLDQGILVPCQSPWNTPLLPVKKPGTNDYRPVQDLREVNKRVEDIHPTVPNPYNLLSGLPPSHQWYTVLDLKDAFFCLRLHPTSQPLFAFEWRDPEMGISGQLTWTRLPQGFKNSPTLFNEALHRDLADFRIQHPDLILLQYVDDLLLAATSEQDCQRGTRALLQTLGNLGYRASAKKAQICQKQVKYLGYLLKEGQRWLTEARKETVMGQPTPKTPRQLREFLGTAGFCRLWIPGFAEMAAPLYPLTKPGTLFNWGPDQQKAYQEIKQALLTAPALGLPDLTKPFELFVDEKQGYAKGVLTQKLGPWRRPVAYLSKKLDPVAAGWPPCLRMVAAIAVLTKDAGKLTMGQPLVILAPHAVEALVKQPPDRWLSNARMTHYQAMLLDTDRVQFGPVVALNPATLLPLPEKEAPHDCLEILAETHGTRPDLTDQPIPDADYTWYTDGSSFLQEGQRRAGAAVTTETEVIWARALPAGTSAQRAELIALTQALKMAEGKKLNVYTDSRYAFATAHVHGEIYRRRGWLTSEGREIKNKNEILALLKALFLPKRLSIIHCPGHQKGNSAEARGNRMADQAAREAAMKAVLETSTLLAGKRTADGSEFEKRTADGSEFESPKKKAKVE

SEQ ID NO: 7253 - protein, 2098 aa, synthetic construct
MPAAKRVKLDGGDKKYSIGLDIGTNSVGWAVITDEYKVPSKKFKVLGNTDRHSIKKNLIGALLFDSGETAEATRLKRTARRRYTRRKNRICYLQEIFSNEMAKVDDSFFHRLEESFLVEEDKKHERHPIFGNIVDEVAYHEKYPTIYHLRKKLVDSTDKADLRLIYLALAHMIKFRGHFLIEGDLNPDNSDVDKLFIQLVQTYNQLFEENPINASGVDAKAILSARLSKSRRLENLIAQLPGEKKNGLFGNLIALSLGLTPNFKSNFDLAEDAKLQLSKDTYDDDLDNLLAQIGDQYADLFLAAKNLSDAILLSDILRVNTEITKAPLSASMIKRYDEHHQDLTLLKALVRQQLPEKYKEIFFDQSKNGYAGYIDGGASQEEFYKFIKPILEKMDGTEELLVKLNREDLLRKQRTFDNGSIPHQIHLGELHAILRRQEDFYPFLKDNREKIEKILTFRIPYYVGPLARGNSRFAWMTRKSEETITPWNFEEVVDKGASAQSFIERMTNFDKNLPNEKVLPKHSLLYEYFTVYNELTKVKYVTEGMRKPAFLSGEQKKAIVDLLFKTNRKVTVKQLKEDYFKKIECFDSVEISGVEDRFNASLGTYHDLLKIIKDKDFLDNEENEDILEDIVLTLTLFEDREMIEERLKTYAHLFDDKVMKQLKRRRYTGWGRLSRKLINGIRDKQSGKTILDFLKSDGFANRNFMQLIHDDSLTFKEDIQKAQVSGQGDSLHEHIANLAGSPAIKKGILQTVKVVDELVKVMGRHKPENIVIEMARENQTTQKGQKNSRERMKRIEEGIKELGSQILKEHPVENTQLQNEKLYLYYLQNGRDMYVDQELDINRLSDYDVDHIVPQSFLKDDSIDNKVLTRSDKARGKSDNVPSEEVVKKMKNYWRQLLNAKLITQRKFDNLTKAERGGLSELDKAGFIKRQLVETRQITKHVAQILDSRMNTKYDENDKLIREVKVITLKSKLVSDFRKDFQFYKVREINNYHHAHDAYLNAVVGTALIKKYPKLESEFVYGDYKVYDVRKMIAKSEQEIGKATAKYFFYSNIMNFFKTEITLANGEIRKRPLIETNGETGEIVWDKGRDFATVRKVLSMPQVNIVKKTEVQTGGFSKESILPKRNSDKLIARKKDWDPKKYGGFDSPTVAYSVLVVAKVEKGKSKKLKSVKELLGITIMERSSFEKNPIDFLEAKGYKEVKKDLIIKLPKYSLFELENGRKRMLASAGELQKGNELALPSKYVNFLYLASHYEKLKGSPEDNEQKQLFVEQHKHYLDEIIEQISEFSKRVILADANLDKVLSAYNKHRDKPIREQAENIIHLFTLTNLGAPAAFKYFDTTIDRKRYTSTKEVLDATLIHQSITGLYETRIDLSQLGGDGGPAPEAAAKGGSGGTAPLEEEYRLFLEAPIQNVTLLEQWKREIPKVWAEINPPGLASTQAPIHVQLLSTALPVRVRQYPITLEAKRSLRETIRKFRAAGILRPVHSPWNTPLLPVRKSGTSEYRMVQDLREVNKRVETIHPTVPNPYTLLSLLPPDRIWYSVLDLKDAFFCIPLAPESQLIFAFEWADAEEGESGQLTWTRLPQGFKNSPTLFDEALNRDLQGFRLDHPSVSLLQYVDDLLIAADTQAACLSATRDLLMTLAELGYRVSGKKAQLCQEEVTYLGFKIHKGSRSLSNSRTQAILQIPVPKTKRQVREFLGTIGYCRLWIPGFAELAQPLYAATRGGNDPLVWGEKEEEAFQSLKLALTQPPALALPSLDKPFQLFVEETSGAAKGVLTQALGPWKRPVAYLSKRLDPVAAGWPRCLRAIAAAALLTREASKLTFGQDIEITSSHNLESLLRSPPDKWLTNARITQYQVLLLDPPRVRFKQTAALNPATLLPETDDTLPIHHCLDTLDSLTSTRPDLTDQPLAQAEATLFTDGSSYIRDGKRYAGAAVVTLDSVIWAEPLPIGTSAQKAELIALTKALEWSKDKSVNIYTDSRYAFATLHVHGMIYRERGLLTAGGKAIKNAPEILALLTAVWLPKRVAVMHCKGHQKDDAPTSTGNRRADEVAREVAIRPLSTQATISAGKRTADGSEFEKRTADGSEFESPKKKAKVE

SEQ ID NO: 7254 - protein, 2173 aa, synthetic construct
MPAAKRVKLDGGDKKYSIGLDIGTNSVGWAVITDEYKVPSKKFKVLGNTDRHSIKKNLIGALLFDSGETAEATRLKRTARRRYTRRKNRICYLQEIFSNEMAKVDDSFFHRLEESFLVEEDKKHERHPIFGNIVDEVAYHEKYPTIYHLRKKLVDSTDKADLRLIYLALAHMIKFRGHFLIEGDLNPDNSDVDKLFIQLVQTYNQLFEENPINASGVDAKAILSARLSKSRRLENLIAQLPGEKKNGLFGNLIALSLGLTPNFKSNFDLAEDAKLQLSKDTYDDDLDNLLAQIGDQYADLFLAAKNLSDAILLSDILRVNTEITKAPLSASMIKRYDEHHQDLTLLKALVRQQLPEKYKEIFFDQSKNGYAGYIDGGASQEEFYKFIKPILEKMDGTEELLVKLNREDLLRKQRTFDNGSIPHQIHLGELHAILRRQEDFYPFLKDNREKIEKILTFRIPYYVGPLARGNSRFAWMTRKSEETITPWNFEEVVDKGASAQSFIERMTNFDKNLPNEKVLPKHSLLYEYFTVYNELTKVKYVTEGMRKPAFLSGEQKKAIVDLLFKTNRKVTVKQLKEDYFKKIECFDSVEISGVEDRFNASLGTYHDLLKIIKDKDFLDNEENEDILEDIVLTLTLFEDREMIEERLKTYAHLFDDKVMKQLKRRRYTGWGRLSRKLINGIRDKQSGKTILDFLKSDGFANRNFMQLIHDDSLTFKEDIQKAQVSGQGDSLHEHIANLAGSPAIKKGILQTVKVVDELVKVMGRHKPENIVIEMARENQTTQKGQKNSRERMKRIEEGIKELGSQILKEHPVENTQLQNEKLYLYYLQNGRDMYVDQELDINRLSDYDVDHIVPQSFLKDDSIDNKVLTRSDKARGKSDNVPSEEVVKKMKNYWRQLLNAKLITQRKFDNLTKAERGGLSELDKAGFIKRQLVETRQITKHVAQILDSRMNTKYDENDKLIREVKVITLKSKLVSDFRKDFQFYKVREINNYHHAHDAYLNAVVGTALIKKYPKLESEFVYGDYKVYDVRKMIAKSEQEIGKATAKYFFYSNIMNFFKTEITLANGEIRKRPLIETNGETGEIVWDKGRDFATVRKVLSMPQVNIVKKTEVQTGGFSKESILPKRNSDKLIARKKDWDPKKYGGFDSPTVAYSVLVVAKVEKGKSKKLKSVKELLGITIMERSSFEKNPIDFLEAKGYKEVKKDLIIKLPKYSLFELENGRKRMLASAGELQKGNELALPSKYVNFLYLASHYEKLKGSPEDNEQKQLFVEQHKHYLDEIIEQISEFSKRVILADANLDKVLSAYNKHRDKPIREQAENIIHLFTLTNLGAPAAFKYFDTTIDRKRYTSTKEVLDATLIHQSITGLYETRIDLSQLGGDGGPAPEAAAKGGSGGMDLLKPLTVERKGVKIKGYWNSQADITCVPKDLLQGEEPVRQQNVTTIHGTQEGDVYYVNLKIDGRRINTEVIGTTLDYAIITPGDVPWILKKPLELTIKLDLEEQQGTLLNNSILSKKGKEELKQLFEKYSALWQSWENQVGHRRIRPHKIATGTVKPTPQKQYHINPKAKPDIQIVINDLLKQGVLIQKESTMNTPVYPVPKPNGRWRMVLDYRAVNKVTPLIAVQNQHSYGILGSLFKGRYKTTIDLSNGFWAHPIVPEDYWITAFTWQGKQYCWTVLPQGFLNSPGLFTGDVVDLLQGIPNVEVYVDDVYISHDSEKEHLEYLDILFNRLKEAGYIISLKKSNIANSIVDFLGFQITNEGRGLTDTFKEKLENITAPTTLKQLQSILGLLNFARNFIPDFTELIAPLYALIPKSTKNYVPWQIEHSTTLETLITKLNGAEYLQGRKGDKTLIMKVNASYTTGYIRYYNEGEKKPISYVSIVFSKTELKFTELEKLLTTVHKGLLKALDLSMGQNIHVYSPIVSMQNIQKTPQTAKKALASRWLSWLSYLEDPRIRFFYDPQMPALKDLPAVDTGKDNKKHPSNFQHIFYTDGSAITSPTKEGHLNAGMGIVYFINKDGNLQKQQEWSISLGNHTAQFAEIAAFEFALKKCLPLGGNILVVTDSNYVAKAYNEELDVWASNGFVNNRKKPLKHISKWKSVADLKRLRPDVVVTHEPGHQKLDSSPHAYGNNLADQLATQASFKVHAGKRTADGSEFEKRTADGSEFESPKKKAKVE

SEQ ID NO: 7255 - protein, 2087 aa, synthetic construct
MPAAKRVKLDGGDKKYSIGLDIGTNSVGWAVITDEYKVPSKKFKVLGNTDRHSIKKNLIGALLFDSGETAEATRLKRTARRRYTRRKNRICYLQEIFSNEMAKVDDSFFHRLEESFLVEEDKKHERHPIFGNIVDEVAYHEKYPTIYHLRKKLVDSTDKADLRLIYLALAHMIKFRGHFLIEGDLNPDNSDVDKLFIQLVQTYNQLFEENPINASGVDAKAILSARLSKSRRLENLIAQLPGEKKNGLFGNLIALSLGLTPNFKSNFDLAEDAKLQLSKDTYDDDLDNLLAQIGDQYADLFLAAKNLSDAILLSDILRVNTEITKAPLSASMIKRYDEHHQDLTLLKALVRQQLPEKYKEIFFDQSKNGYAGYIDGGASQEEFYKFIKPILEKMDGTEELLVKLNREDLLRKQRTFDNGSIPHQIHLGELHAILRRQEDFYPFLKDNREKIEKILTFRIPYYVGPLARGNSRFAWMTRKSEETITPWNFEEVVDKGASAQSFIERMTNFDKNLPNEKVLPKHSLLYEYFTVYNELTKVKYVTEGMRKPAFLSGEQKKAIVDLLFKTNRKVTVKQLKEDYFKKIECFDSVEISGVEDRFNASLGTYHDLLKIIKDKDFLDNEENEDILEDIVLTLTLFEDREMIEERLKTYAHLFDDKVMKQLKRRRYTGWGRLSRKLINGIRDKQSGKTILDFLKSDGFANRNFMQLIHDDSLTFKEDIQKAQVSGQGDSLHEHIANLAGSPAIKKGILQTVKVVDELVKVMGRHKPENIVIEMARENQTTQKGQKNSRERMKRIEEGIKELGSQILKEHPVENTQLQNEKLYLYYLQNGRDMYVDQELDINRLSDYDVDHIVPQSFLKDDSIDNKVLTRSDKARGKSDNVPSEEVVKKMKNYWRQLLNAKLITQRKFDNLTKAERGGLSELDKAGFIKRQLVETRQITKHVAQILDSRMNTKYDENDKLIREVKVITLKSKLVSDFRKDFQFYKVREINNYHHAHDAYLNAVVGTALIKKYPKLESEFVYGDYKVYDVRKMIAKSEQEIGKATAKYFFYSNIMNFFKTEITLANGEIRKRPLIETNGETGEIVWDKGRDFATVRKVLSMPQVNIVKKTEVQTGGFSKESILPKRNSDKLIARKKDWDPKKYGGFDSPTVAYSVLVVAKVEKGKSKKLKSVKELLGITIMERSSFEKNPIDFLEAKGYKEVKKDLIIKLPKYSLFELENGRKRMLASAGELQKGNELALPSKYVNFLYLASHYEKLKGSPEDNEQKQLFVEQHKHYLDEIIEQISEFSKRVILADANLDKVLSAYNKHRDKPIREQAENIIHLFTLTNLGAPAAFKYFDTTIDRKRYTSTKEVLDATLIHQSITGLYETRIDLSQLGGDGGPAPEAAAKGGSGGVPWILKKPLELTIKLDLEEQQGTLLNNSILSKKGKEELKQLFEKYSALWQSWENQVGHRRIRPHKIATGTVKPTPQKQYHINPKAKPDIQIVINDLLKQGVLIQKESTMNTPVYPVPKPNGRWRMVLDYRAVNKVTPLIAVQNQHSYGILGSLFKGRYKTTIDLSNGFWAHPIVPEDYWITAFTWQGKQYCWTVLPQGFLNSPGLFTGDVVDLLQGIPNVEVYVDDVYISHDSEKEHLEYLDILFNRLKEAGYIISLKKSNIANSIVDFLGFQITNEGRGLTDTFKEKLENITAPTTLKQLQSILGLLNFARNFIPDFTELIAPLYALIPKSTKNYVPWQIEHSTTLETLITKLNGAEYLQGRKGDKTLIMKVNASYTTGYIRYYNEGEKKPISYVSIVFSKTELKFTELEKLLTTVHKGLLKALDLSMGQNIHVYSPIVSMQNIQKTPQTAKKALASRWLSWLSYLEDPRIRFFYDPQMPALKDLPAVDTGKDNKKHPSNFQHIFYTDGSAITSPTKEGHLNAGMGIVYFINKDGNLQKQQEWSISLGNHTAQFAEIAAFEFALKKCLPLGGNILVVTDSNYVAKAYNEELDVWASNGFVNNRKKPLKHISKWKSVADLKRLRPDVVVTHEPGHQKLDSSPHAYGNNLADQLATQASFKVHAGKRTADGSEFEKRTADGSEFESPKKKAKVE

SEQ ID NO: 7256 - protein, 2095 aa, synthetic construct
MPAAKRVKLDGGDKKYSIGLDIGTNSVGWAVITDEYKVPSKKFKVLGNTDRHSIKKNLIGALLFDSGETAEATRLKRTARRRYTRRKNRICYLQEIFSNEMAKVDDSFFHRLEESFLVEEDKKHERHPIFGNIVDEVAYHEKYPTIYHLRKKLVDSTDKADLRLIYLALAHMIKFRGHFLIEGDLNPDNSDVDKLFIQLVQTYNQLFEENPINASGVDAKAILSARLSKSRRLENLIAQLPGEKKNGLFGNLIALSLGLTPNFKSNFDLAEDAKLQLSKDTYDDDLDNLLAQIGDQYADLFLAAKNLSDAILLSDILRVNTEITKAPLSASMIKRYDEHHQDLTLLKALVRQQLPEKYKEIFFDQSKNGYAGYIDGGASQEEFYKFIKPILEKMDGTEELLVKLNREDLLRKQRTFDNGSIPHQIHLGELHAILRRQEDFYPFLKDNREKIEKILTFRIPYYVGPLARGNSRFAWMTRKSEETITPWNFEEVVDKGASAQSFIERMTNFDKNLPNEKVLPKHSLLYEYFTVYNELTKVKYVTEGMRKPAFLSGEQKKAIVDLLFKTNRKVTVKQLKEDYFKKIECFDSVEISGVEDRFNASLGTYHDLLKIIKDKDFLDNEENEDILEDIVLTLTLFEDREMIEERLKTYAHLFDDKVMKQLKRRRYTGWGRLSRKLINGIRDKQSGKTILDFLKSDGFANRNFMQLIHDDSLTFKEDIQKAQVSGQGDSLHEHIANLAGSPAIKKGILQTVKVVDELVKVMGRHKPENIVIEMARENQTTQKGQKNSRERMKRIEEGIKELGSQILKEHPVENTQLQNEKLYLYYLQNGRDMYVDQELDINRLSDYDVDHIVPQSFLKDDSIDNKVLTRSDKARGKSDNVPSEEVVKKMKNYWRQLLNAKLITQRKFDNLTKAERGGLSELDKAGFIKRQLVETRQITKHVAQILDSRMNTKYDENDKLIREVKVITLKSKLVSDFRKDFQFYKVREINNYHHAHDAYLNAVVGTALIKKYPKLESEFVYGDYKVYDVRKMIAKSEQEIGKATAKYFFYSNIMNFFKTEITLANGEIRKRPLIETNGETGEIVWDKGRDFATVRKVLSMPQVNIVKKTEVQTGGFSKESILPKRNSDKLIARKKDWDPKKYGGFDSPTVAYSVLVVAKVEKGKSKKLKSVKELLGITIMERSSFEKNPIDFLEAKGYKEVKKDLIIKLPKYSLFELENGRKRMLASAGELQKGNELALPSKYVNFLYLASHYEKLKGSPEDNEQKQLFVEQHKHYLDEIIEQISEFSKRVILADANLDKVLSAYNKHRDKPIREQAENIIHLFTLTNLGAPAAFKYFDTTIDRKRYTSTKEVLDATLIHQSITGLYETRIDLSQLGGDGGPAPEAAAKGGSGGTLQLEEEYRLFEPESTQKQEMDIWLKNFPQAWAETGGMGTAHCQAPVLIQLKATATPISIRQYPMPHEAYQGIKPHIRRMLDQGILKPCQSPWNTPLLPVKKPGTEDYRPVQDLREVNKRVEDIHPTVPNPYNLLSTLPPSHPWYTVLDLKDAFFCLRLHSESQLLFAFEWRDPEIGLSGQLTWTRLPQGFKNSPTLFNEALHSDLADFRVRYPALVLLQYVDDLLLAAATRTECLEGTKALLETLGNKGYRASAKKAQICLQEVTYLGYSLKDGQRWLTKARKEAILSIPVPKNSRQVREFLGTAGYCRLWIPGFAELAAPLYPLTRPGTLFQWGTEQQLAFEDIKKALLSSPALGLPDITKPFELFIDENSGFAKGVLVQKLGPWKRPVAYLSKKLDTVASGWPPCLRMVAAIAILVKDAGKLTLGQPLTILTSHPVEALVRQPPNKWLSNARMTHYQAMLLDAERVHFGPTVSLNPATLLPLPSGGNHHDCLQILAETHGTRPDLTDQPLPDADLTWYTDGSSFIRNGEREAGAAVTTESEVIWAAPLPPGTSAQRAELIALTQALKMAEGKKLTVYTDSRYAFATTHVHGEIYRRRGWLTSEGKEIKNKNEILALLEALFLPKRLSIIHCPGHQKGDSPQAKGNRLADDTAKKAATETHSSLTVLPAGKRTADGSEFEKRTADGSEFESPKKKAKVE

SEQ ID NO: 7257 - protein, 2094 aa, synthetic construct
MPAAKRVKLDGGDKKYSIGLDIGTNSVGWAVITDEYKVPSKKFKVLGNTDRHSIKKNLIGALLFDSGETAEATRLKRTARRRYTRRKNRICYLQEIFSNEMAKVDDSFFHRLEESFLVEEDKKHERHPIFGNIVDEVAYHEKYPTIYHLRKKLVDSTDKADLRLIYLALAHMIKFRGHFLIEGDLNPDNSDVDKLFIQLVQTYNQLFEENPINASGVDAKAILSARLSKSRRLENLIAQLPGEKKNGLFGNLIALSLGLTPNFKSNFDLAEDAKLQLSKDTYDDDLDNLLAQIGDQYADLFLAAKNLSDAILLSDILRVNTEITKAPLSASMIKRYDEHHQDLTLLKALVRQQLPEKYKEIFFDQSKNGYAGYIDGGASQEEFYKFIKPILEKMDGTEELLVKLNREDLLRKQRTFDNGSIPHQIHLGELHAILRRQEDFYPFLKDNREKIEKILTFRIPYYVGPLARGNSRFAWMTRKSEETITPWNFEEVVDKGASAQSFIERMTNFDKNLPNEKVLPKHSLLYEYFTVYNELTKVKYVTEGMRKPAFLSGEQKKAIVDLLFKTNRKVTVKQLKEDYFKKIECFDSVEISGVEDRFNASLGTYHDLLKIIKDKDFLDNEENEDILEDIVLTLTLFEDREMIEERLKTYAHLFDDKVMKQLKRRRYTGWGRLSRKLINGIRDKQSGKTILDFLKSDGFANRNFMQLIHDDSLTFKEDIQKAQVSGQGDSLHEHIANLAGSPAIKKGILQTVKVVDELVKVMGRHKPENIVIEMARENQTTQKGQKNSRERMKRIEEGIKELGSQILKEHPVENTQLQNEKLYLYYLQNGRDMYVDQELDINRLSDYDVDHIVPQSFLKDDSIDNKVLTRSDKARGKSDNVPSEEVVKKMKNYWRQLLNAKLITQRKFDNLTKAERGGLSELDKAGFIKRQLVETRQITKHVAQILDSRMNTKYDENDKLIREVKVITLKSKLVSDFRKDFQFYKVREINNYHHAHDAYLNAVVGTALIKKYPKLESEFVYGDYKVYDVRKMIAKSEQEIGKATAKYFFYSNIMNFFKTEITLANGEIRKRPLIETNGETGEIVWDKGRDFATVRKVLSMPQVNIVKKTEVQTGGFSKESILPKRNSDKLIARKKDWDPKKYGGFDSPTVAYSVLVVAKVEKGKSKKLKSVKELLGITIMERSSFEKNPIDFLEAKGYKEVKKDLIIKLPKYSLFELENGRKRMLASAGELQKGNELALPSKYVNFLYLASHYEKLKGSPEDNEQKQLFVEQHKHYLDEIIEQISEFSKRVILADANLDKVLSAYNKHRDKPIREQAENIIHLFTLTNLGAPAAFKYFDTTIDRKRYTSTKEVLDATLIHQSITGLYETRIDLSQLGGDGGPAPEAAAKGGSGGVLNLEEEYRLHEKPVPSSIDPSWLQLFPTVWAERAGMGLANQVPPVVVELRSGASPVAVRQYPMSKEAREGIRPHIQKFLDLGVLVPCRSPWNTPLLPVKKPGTNDYRPVQDLREINKRVQDIHPTVPNPYNLLSSLPPSYTWYSVLDLKDAFFCLRLHPNSQPLFAFEWKDPEKGNTGQLTWTRLPQGFKNSPTLFNEALHRDLAPFRALNPQVVLLQYVDDLLVAAPTYEDCKKGTQKLLQELSKLGYRVSAKKAQLCQREVTYLGYLLKEGKRWLTPARKATVMKIPVPTTPRQVREFLGKAGFCRLFIPGFASLAAPLYPLTKPSIPFIWTEEHQQAFDHIKKALLSAPALALPDLTKPFTLYIDERAGVARGVLTQTLGPWRRPVAYLSKKLDPVASGWPTCLKAVAAVALLLKDADKLTLGQNVTVIASHSLESIVRQPPDRWMTNARMTHYQSLLLNERVSFAPPAVLNPATLLPVESEATPVHRCSEILAEETGTRRDLEDQPLPGVPTWYTDGSSFITEGKRRAGAPIVDGKRTVWASSLPEGTSAQKAELVALTQALRLAEGKNINIYTDSRYAFATAHIHGAIYKQRGWLTSAGKDIKNKEEILALLEAIHLPRRVAIIHCPGHQRGSNPVATGNRRADEAAKQAALSTRVLAGTTKPAGKRTADGSEFEKRTADGSEFESPKKKAKVE

SEQ ID NO: 7258 - protein, 2127 aa, synthetic construct
MPAAKRVKLDGGDKKYSIGLDIGTNSVGWAVITDEYKVPSKKFKVLGNTDRHSIKKNLIGALLFDSGETAEATRLKRTARRRYTRRKNRICYLQEIFSNEMAKVDDSFFHRLEESFLVEEDKKHERHPIFGNIVDEVAYHEKYPTIYHLRKKLVDSTDKADLRLIYLALAHMIKFRGHFLIEGDLNPDNSDVDKLFIQLVQTYNQLFEENPINASGVDAKAILSARLSKSRRLENLIAQLPGEKKNGLFGNLIALSLGLTPNFKSNFDLAEDAKLQLSKDTYDDDLDNLLAQIGDQYADLFLAAKNLSDAILLSDILRVNTEITKAPLSASMIKRYDEHHQDLTLLKALVRQQLPEKYKEIFFDQSKNGYAGYIDGGASQEEFYKFIKPILEKMDGTEELLVKLNREDLLRKQRTFDNGSIPHQIHLGELHAILRRQEDFYPFLKDNREKIEKILTFRIPYYVGPLARGNSRFAWMTRKSEETITPWNFEEVVDKGASAQSFIERMTNFDKNLPNEKVLPKHSLLYEYFTVYNELTKVKYVTEGMRKPAFLSGEQKKAIVDLLFKTNRKVTVKQLKEDYFKKIECFDSVEISGVEDRFNASLGTYHDLLKIIKDKDFLDNEENEDILEDIVLTLTLFEDREMIEERLKTYAHLFDDKVMKQLKRRRYTGWGRLSRKLINGIRDKQSGKTILDFLKSDGFANRNFMQLIHDDSLTFKEDIQKAQVSGQGDSLHEHIANLAGSPAIKKGILQTVKVVDELVKVMGRHKPENIVIEMARENQTTQKGQKNSRERMKRIEEGIKELGSQILKEHPVENTQLQNEKLYLYYLQNGRDMYVDQELDINRLSDYDVDHIVPQSFLKDDSIDNKVLTRSDKARGKSDNVPSEEVVKKMKNYWRQLLNAKLITQRKFDNLTKAERGGLSELDKAGFIKRQLVETRQITKHVAQILDSRMNTKYDENDKLIREVKVITLKSKLVSDFRKDFQFYKVREINNYHHAHDAYLNAVVGTALIKKYPKLESEFVYGDYKVYDVRKMIAKSEQEIGKATAKYFFYSNIMNFFKTEITLANGEIRKRPLIETNGETGEIVWDKGRDFATVRKVLSMPQVNIVKKTEVQTGGFSKESILPKRNSDKLIARKKDWDPKKYGGFDSPTVAYSVLVVAKVEKGKSKKLKSVKELLGITIMERSSFEKNPIDFLEAKGYKEVKKDLIIKLPKYSLFELENGRKRMLASAGELQKGNELALPSKYVNFLYLASHYEKLKGSPEDNEQKQLFVEQHKHYLDEIIEQISEFSKRVILADANLDKVLSAYNKHRDKPIREQAENIIHLFTLTNLGAPAAFKYFDTTIDRKRYTSTKEVLDATLIHQSITGLYETRIDLSQLGGDGGPAPEAAAKGGSGGLLGRDLLTKLKAQIQFSTEGPQVTWEDRPAMCLVLNLEEEYRLHEKPVPPSIDPSWLQLFPMVWAEKAGMGLANQVPPVVVELKSDASPVAVRQYPMSKEAREGIRPHIQRFLDLGILVPCQSPWNTPLLPVKKPGTNDYRPVQDLREVNKRVQDIHPTVPNPYNLLSSLPPSHTWYSVLDLKDAFFCLKLHPNSQPLFAFEWRDPEKGNTGQLTWTRLPQGFKNSPTLFNEALHRDLASFRALNPQVVMLQYVDDLLVAAPTYRDCKEGTRRLLQELSKLGYRVSAKKAQLCREEVTYLGYLLKGGKRWLTPARKATVMKIPTPTTPRQVREFLGKAGFCRLFIPGFASLAAPLYPLTRPKVPFTWTEAHQEAFGRIKEALLSAPALALPDLTKPFALYVDEKEGVARGVLTQTLGPWRRPVAYLSKKLDPVASGWPTCLKAIAAVALLLKDADKLTLGQNVLVIAPHNLESIVRQPPDRWMTNARMTHYQSLLLNERVSFAPPAILNPATLLPVESDDTPIHICSEILAEETGTRPDLRDQPLPGVPAWYTDGSSFIMDGRRQAGAAIVDNKRTVWASNLPEGTSAQKAELIALTQALRLAEGKSINIYTDSRYAFATAHVHGAIYKQRGWLTSAGKDIKNKEEILALLEAIHLPKRVAIIHCPGHQRGTDPVATGNRKADEAAKQAAQSTRILTETTKNAGKRTADGSEFEKRTADGSEFESPKKKAKVE

SEQ ID NO: 7259 - protein, 2218 aa, synthetic construct
MPAAKRVKLDGGDKKYSIGLDIGTNSVGWAVITDEYKVPSKKFKVLGNTDRHSIKKNLIGALLFDSGETAEATRLKRTARRRYTRRKNRICYLQEIFSNEMAKVDDSFFHRLEESFLVEEDKKHERHPIFGNIVDEVAYHEKYPTIYHLRKKLVDSTDKADLRLIYLALAHMIKFRGHFLIEGDLNPDNSDVDKLFIQLVQTYNQLFEENPINASGVDAKAILSARLSKSRRLENLIAQLPGEKKNGLFGNLIALSLGLTPNFKSNFDLAEDAKLQLSKDTYDDDLDNLLAQIGDQYADLFLAAKNLSDAILLSDILRVNTEITKAPLSASMIKRYDEHHQDLTLLKALVRQQLPEKYKEIFFDQSKNGYAGYIDGGASQEEFYKFIKPILEKMDGTEELLVKLNREDLLRKQRTFDNGSIPHQIHLGELHAILRRQEDFYPFLKDNREKIEKILTFRIPYYVGPLARGNSRFAWMTRKSEETITPWNFEEVVDKGASAQSFIERMTNFDKNLPNEKVLPKHSLLYEYFTVYNELTKVKYVTEGMRKPAFLSGEQKKAIVDLLFKTNRKVTVKQLKEDYFKKIECFDSVEISGVEDRFNASLGTYHDLLKIIKDKDFLDNEENEDILEDIVLTLTLFEDREMIEERLKTYAHLFDDKVMKQLKRRRYTGWGRLSRKLINGIRDKQSGKTILDFLKSDGFANRNFMQLIHDDSLTFKEDIQKAQVSGQGDSLHEHIANLAGSPAIKKGILQTVKVVDELVKVMGRHKPENIVIEMARENQTTQKGQKNSRERMKRIEEGIKELGSQILKEHPVENTQLQNEKLYLYYLQNGRDMYVDQELDINRLSDYDVDHIVPQSFLKDDSIDNKVLTRSDKARGKSDNVPSEEVVKKMKNYWRQLLNAKLITQRKFDNLTKAERGGLSELDKAGFIKRQLVETRQITKHVAQILDSRMNTKYDENDKLIREVKVITLKSKLVSDFRKDFQFYKVREINNYHHAHDAYLNAVVGTALIKKYPKLESEFVYGDYKVYDVRKMIAKSEQEIGKATAKYFFYSNIMNFFKTEITLANGEIRKRPLIETNGETGEIVWDKGRDFATVRKVLSMPQVNIVKKTEVQTGGFSKESILPKRNSDKLIARKKDWDPKKYGGFDSPTVAYSVLVVAKVEKGKSKKLKSVKELLGITIMERSSFEKNPIDFLEAKGYKEVKKDLIIKLPKYSLFELENGRKRMLASAGELQKGNELALPSKYVNFLYLASHYEKLKGSPEDNEQKQLFVEQHKHYLDEIIEQISEFSKRVILADANLDKVLSAYNKHRDKPIREQAENIIHLFTLTNLGAPAAFKYFDTTIDRKRYTSTKEVLDATLIHQSITGLYETRIDLSQLGGDGGPAPEAAAKGGSGGTLGDQGSRGSDPLPEPRVTLTVEGIPTEFLVNTGAEHSVLTKPMGKMGSKRTVVAGATGSKVYPWTTKRLLKIGQKQVTHSFLVIPECPAPLLGRDLLTKLKAQIQFSTEGPQVTWEDRPAMCLVLNLEEEYRLHEKPVPPSIDPSWLQLFPMVWAEKAGMGLANQVPPVVVELKSDASPVAVRQYPMSKEAREGIRPHIQRFLDLGILVPCQSPWNTPLLPVKKPGTNDYRPVQDLREVNKRVQDIHPTVPNPYNLLSSLPPSHTWYSVLDLKDAFFCLKLHPNSQPLFAFEWRDPEKGNTGQLTWTRLPQGFKNSPTLFNEALHRDLASFRALNPQVVMLQYVDDLLVAAPTYRDCKEGTRRLLQELSKLGYRVSAKKAQLCREEVTYLGYLLKGGKRWLTPARKATVMKIPTPTTPRQVREFLGTAGFCRLWIPGFASLAAPLYPLTRPKVPFTWTEAHQEAFGRIKEALLSAPALALPDLTKPFALYVDEKEGVARGVLTQTLGPWRRPVAYLSKKLDPVASGWPTCLKAIAAVALLLKDADKLTLGQNVLVIAPHNLESIVRQPPDRWMTNARMTHYQSLLLNERVSFAPPAILNPATLLPVESDDTPIHICSEILAEETGTRPDLRDQPLPGVPAWYTDGSSFIMDGRRQAGAAIVDNKRTVWASNLPEGTSAQKAELIALTQALRLAEGKSINIYTDSRYAFATAHVHGAIYKQRGWLTSAGKDIKNKEEILALLEAIHLPKRVAIIHCPGHQRGTDPVATGNRKADEAAKQAAQSTRILTETTKNAGKRTADGSEFEKRTADGSEFESPKKKAKVE

SEQ ID NO: 7260 - protein, 2218 aa, synthetic construct
MPAAKRVKLDGGDKKYSIGLDIGTNSVGWAVITDEYKVPSKKFKVLGNTDRHSIKKNLIGALLFDSGETAEATRLKRTARRRYTRRKNRICYLQEIFSNEMAKVDDSFFHRLEESFLVEEDKKHERHPIFGNIVDEVAYHEKYPTIYHLRKKLVDSTDKADLRLIYLALAHMIKFRGHFLIEGDLNPDNSDVDKLFIQLVQTYNQLFEENPINASGVDAKAILSARLSKSRRLENLIAQLPGEKKNGLFGNLIALSLGLTPNFKSNFDLAEDAKLQLSKDTYDDDLDNLLAQIGDQYADLFLAAKNLSDAILLSDILRVNTEITKAPLSASMIKRYDEHHQDLTLLKALVRQQLPEKYKEIFFDQSKNGYAGYIDGGASQEEFYKFIKPILEKMDGTEELLVKLNREDLLRKQRTFDNGSIPHQIHLGELHAILRRQEDFYPFLKDNREKIEKILTFRIPYYVGPLARGNSRFAWMTRKSEETITPWNFEEVVDKGASAQSFIERMTNFDKNLPNEKVLPKHSLLYEYFTVYNELTKVKYVTEGMRKPAFLSGEQKKAIVDLLFKTNRKVTVKQLKEDYFKKIECFDSVEISGVEDRFNASLGTYHDLLKIIKDKDFLDNEENEDILEDIVLTLTLFEDREMIEERLKTYAHLFDDKVMKQLKRRRYTGWGRLSRKLINGIRDKQSGKTILDFLKSDGFANRNFMQLIHDDSLTFKEDIQKAQVSGQGDSLHEHIANLAGSPAIKKGILQTVKVVDELVKVMGRHKPENIVIEMARENQTTQKGQKNSRERMKRIEEGIKELGSQILKEHPVENTQLQNEKLYLYYLQNGRDMYVDQELDINRLSDYDVDHIVPQSFLKDDSIDNKVLTRSDKARGKSDNVPSEEVVKKMKNYWRQLLNAKLITQRKFDNLTKAERGGLSELDKAGFIKRQLVETRQITKHVAQILDSRMNTKYDENDKLIREVKVITLKSKLVSDFRKDFQFYKVREINNYHHAHDAYLNAVVGTALIKKYPKLESEFVYGDYKVYDVRKMIAKSEQEIGKATAKYFFYSNIMNFFKTEITLANGEIRKRPLIETNGETGEIVWDKGRDFATVRKVLSMPQVNIVKKTEVQTGGFSKESILPKRNSDKLIARKKDWDPKKYGGFDSPTVAYSVLVVAKVEKGKSKKLKSVKELLGITIMERSSFEKNPIDFLEAKGYKEVKKDLIIKLPKYSLFELENGRKRMLASAGELQKGNELALPSKYVNFLYLASHYEKLKGSPEDNEQKQLFVEQHKHYLDEIIEQISEFSKRVILADANLDKVLSAYNKHRDKPIREQAENIIHLFTLTNLGAPAAFKYFDTTIDRKRYTSTKEVLDATLIHQSITGLYETRIDLSQLGGDGGPAPEAAAKGGSGGTLGDQGSRGSDPLPEPRVTLTVEGIPTEFLVNTGAEHSVLTKPMGKMGSKRTVVAGATGSKVYPWTTKRLLKIGQKQVTHSFLVIPECPAPLLGRDLLTKLKAQIQFSTEGPQVTWEDRPAMCLVLNLEEEYRLHEKPVPPSIDPSWLQLFPMVWAEKAGMGLANQVPPVVVELKSDASPVAVRQYPMSKEAREGIRPHIQRFLDLGILVPCQSPWNTPLLPVKKPGTNDYRPVQDLREVNKRVQDIHPTVPNPYNLLSSLPPSHTWYSVLDLKDAFFCLKLHPNSQPLFAFEWRDPEKGNTGQLTWTRLPQGFKNSPTLFNEALHRDLASFRALNPQVVMLQYVDDLLVAAPTYRDCKEGTRRLLQELSKLGYRVSAKKAQLCREEVTYLGYLLKGGKRWLTPARKATVMKIPTPTTPRQVREFLGKAGFCRLFIPGFASLAAPLYPLTRPKVPFTWTEAHQEAFGRIKEALLSAPALALPDLTKPFALYVDEKEGVARGVLTQTLGPWRRPVAYLSKKLDPVASGWPTCLKAIAAVALLLKDADKLTLGQNVLVIAPHNLESIVRQPPDRWMTNARMTHYQSLLLNERVSFAPPAILNPATLLPVESDDTPIHICSEILAEETGTRPDLRDQPLPGVPAWYTDGSSFIMDGRRQAGAAIVDNKRTVWASNLPEGTSAQKAELIALTQALRLAEGKSINIYTDSRYAFATAHVHGAIYKQRGWLTSAGKDIKNKEEILALLEAIHLPKRVAIIHCPGHQRGTDPVATGNRKADEAAKQAAQSTRILTETTKNAGKRTADGSEFEKRTADGSEFESPKKKAKVE

SEQ ID NO: 7261 - protein, 2096 aa, synthetic construct
MPAAKRVKLDGGDKKYSIGLDIGTNSVGWAVITDEYKVPSKKFKVLGNTDRHSIKKNLIGALLFDSGETAEATRLKRTARRRYTRRKNRICYLQEIFSNEMAKVDDSFFHRLEESFLVEEDKKHERHPIFGNIVDEVAYHEKYPTIYHLRKKLVDSTDKADLRLIYLALAHMIKFRGHFLIEGDLNPDNSDVDKLFIQLVQTYNQLFEENPINASGVDAKAILSARLSKSRRLENLIAQLPGEKKNGLFGNLIALSLGLTPNFKSNFDLAEDAKLQLSKDTYDDDLDNLLAQIGDQYADLFLAAKNLSDAILLSDILRVNTEITKAPLSASMIKRYDEHHQDLTLLKALVRQQLPEKYKEIFFDQSKNGYAGYIDGGASQEEFYKFIKPILEKMDGTEELLVKLNREDLLRKQRTFDNGSIPHQIHLGELHAILRRQEDFYPFLKDNREKIEKILTFRIPYYVGPLARGNSRFAWMTRKSEETITPWNFEEVVDKGASAQSFIERMTNFDKNLPNEKVLPKHSLLYEYFTVYNELTKVKYVTEGMRKPAFLSGEQKKAIVDLLFKTNRKVTVKQLKEDYFKKIECFDSVEISGVEDRFNASLGTYHDLLKIIKDKDFLDNEENEDILEDIVLTLTLFEDREMIEERLKTYAHLFDDKVMKQLKRRRYTGWGRLSRKLINGIRDKQSGKTILDFLKSDGFANRNFMQLIHDDSLTFKEDIQKAQVSGQGDSLHEHIANLAGSPAIKKGILQTVKVVDELVKVMGRHKPENIVIEMARENQTTQKGQKNSRERMKRIEEGIKELGSQILKEHPVENTQLQNEKLYLYYLQNGRDMYVDQELDINRLSDYDVDHIVPQSFLKDDSIDNKVLTRSDKARGKSDNVPSEEVVKKMKNYWRQLLNAKLITQRKFDNLTKAERGGLSELDKAGFIKRQLVETRQITKHVAQILDSRMNTKYDENDKLIREVKVITLKSKLVSDFRKDFQFYKVREINNYHHAHDAYLNAVVGTALIKKYPKLESEFVYGDYKVYDVRKMIAKSEQEIGKATAKYFFYSNIMNFFKTEITLANGEIRKRPLIETNGETGEIVWDKGRDFATVRKVLSMPQVNIVKKTEVQTGGFSKESILPKRNSDKLIARKKDWDPKKYGGFDSPTVAYSVLVVAKVEKGKSKKLKSVKELLGITIMERSSFEKNPIDFLEAKGYKEVKKDLIIKLPKYSLFELENGRKRMLASAGELQKGNELALPSKYVNFLYLASHYEKLKGSPEDNEQKQLFVEQHKHYLDEIIEQISEFSKRVILADANLDKVLSAYNKHRDKPIREQAENIIHLFTLTNLGAPAAFKYFDTTIDRKRYTSTKEVLDATLIHQSITGLYETRIDLSQLGGDGGPAPEAAAKGGSGGTLNLEDEYRLYETSAEPEVSPGSTWLSDFPQAWAETGGMGLAVRQAPLIIPLKATSTPVSIKQYPMSQEAKLGIKPHIQRLLDQGILVPCQSPWNTPLLPVKKPGTNDYRPVQDLREVNKRVEDIHPTVPNPYNLLSGLPPSHRWYTVLDLKDAFFCLRLHPTSQPLFAFEWRDPGMGISGQLTWTRLPQGFKNSPTLFNEALHRDLADFRIQHPDLILLQYVDDILLAATSELDCQQGTRALLLTLGNLGYRASAKKAQLCQKQVKYLGYLLKEGQRWLTEARKETVMGQPTPKTPRQLREFLGTAGFCRLWIPGFAEMAAPLYPLTKPGTLFNWGPDQQKAYQEIKQALLTAPALGLPDLTKPFELFVDEKQGYAKGVLTQKLGPWRRPVAYLSKKLDPVAAGWPPCLRMVAAIAVLRKDAGKLTMGQPLVILAPHAVEALVKQPPDRWLSNARMTHYQAMLLDTDRVQFGPVVALNPATLLPLPEEGAPHDCLEILAETHGTRPDLTDQPIPDADHTWYTDGSSFLQEGQRKAGAAVTTETEVIWARALPAGTSAQRAELIALTQALKMAEGKRLNVYTDSRYAFATAHIHGEIYRRRGWLTSEGREIKNKSEILALLKALFLPKRLSIIHCLGHQKGDSAEARGNRLADQAAREAAIKTPPDTSTLLAGKRTADGSEFEKRTADGSEFESPKKKAKVE

SEQ ID NO: 7262 - protein, 2096 aa, synthetic construct; identical to SEQ ID NO: 4528

SEQ ID NO: 7263 - protein, 2096 aa, synthetic construct
MPAAKRVKLDGGDKKYSIGLDIGTNSVGWAVITDEYKVPSKKFKVLGNTDRHSIKKNLIGALLFDSGETAEATRLKRTARRRYTRRKNRICYLQEIFSNEMAKVDDSFFHRLEESFLVEEDKKHERHPIFGNIVDEVAYHEKYPTIYHLRKKLVDSTDKADLRLIYLALAHMIKFRGHFLIEGDLNPDNSDVDKLFIQLVQTYNQLFEENPINASGVDAKAILSARLSKSRRLENLIAQLPGEKKNGLFGNLIALSLGLTPNFKSNFDLAEDAKLQLSKDTYDDDLDNLLAQIGDQYADLFLAAKNLSDAILLSDILRVNTEITKAPLSASMIKRYDEHHQDLTLLKALVRQQLPEKYKEIFFDQSKNGYAGYIDGGASQEEFYKFIKPILEKMDGTEELLVKLNREDLLRKQRTFDNGSIPHQIHLGELHAILRRQEDFYPFLKDNREKIEKILTFRIPYYVGPLARGNSRFAWMTRKSEETITPWNFEEVVDKGASAQSFIERMTNFDKNLPNEKVLPKHSLLYEYFTVYNELTKVKYVTEGMRKPAFLSGEQKKAIVDLLFKTNRKVTVKQLKEDYFKKIECFDSVEISGVEDRFNASLGTYHDLLKIIKDKDFLDNEENEDILEDIVLTLTLFEDREMIEERLKTYAHLFDDKVMKQLKRRRYTGWGRLSRKLINGIRDKQSGKTILDFLKSDGFANRNFMQLIHDDSLTFKEDIQKAQVSGQGDSLHEHIANLAGSPAIKKGILQTVKVVDELVKVMGRHKPENIVIEMARENQTTQKGQKNSRERMKRIEEGIKELGSQILKEHPVENTQLQNEKLYLYYLQNGRDMYVDQELDINRLSDYDVDHIVPQSFLKDDSIDNKVLTRSDKARGKSDNVPSEEVVKKMKNYWRQLLNAKLITQRKFDNLTKAERGGLSELDKAGFIKRQLVETRQITKHVAQILDSRMNTKYDENDKLIREVKVITLKSKLVSDFRKDFQFYKVREINNYHHAHDAYLNAVVGTALIKKYPKLESEFVYGDYKVYDVRKMIAKSEQEIGKATAKYFFYSNIMNFFKTEITLANGEIRKRPLIETNGETGEIVWDKGRDFATVRKVLSMPQVNIVKKTEVQTGGFSKESILPKRNSDKLIARKKDWDPKKYGGFDSPTVAYSVLVVAKVEKGKSKKLKSVKELLGITIMERSSFEKNPIDFLEAKGYKEVKKDLIIKLPKYSLFELENGRKRMLASAGELQKGNELALPSKYVNFLYLASHYEKLKGSPEDNEQKQLFVEQHKHYLDEIIEQISEFSKRVILADANLDKVLSAYNKHRDKPIREQAENIIHLFTLTNLGAPAAFKYFDTTIDRKRYTSTKEVLDATLIHQSITGLYETRIDLSQLGGDGGPAPEAAAKGGSGGTLGIEDEYRLHETSTEPDVSLGSTWLSDFPQAWAETGGMGLAVRQAPLIIPLKATSTPVSIQQYPMSHEARLGIKPHIQRLLDQGILVPCQSPWNTPLLPVKKPGTNDYRPVQDLREVNKRVEDIHPTVPNPYNLLSGLPPSHQWYTVLDLKDAFFCLRLHPTSQPLFAFEWRDPGMGISGQLTWTRLPQGFKNSPTLFNEALHRDLADFRIQHPDLILLQYVDDILLAATSELDCQQGTRALLQTLGDLGYRASAKKAQICQKQVKYLGYLLREGQRWLTEARKETVMGQPVPKTPRQLREFLGTAGFCRLWIPGFAEMAAPLYPLTKPGTLFSWGPDQQKAYQEIKQALLTAPALGLPDLTKPFELFVDEKQGYAKGVLTQKLGPWRRPVAYLSKKLDPVAAGWPPCLRMVAAIAVLTKDAGKLTMGQPLVILAPHAVEALVKQPPDRWLSNARMTHYQAMLLDTDRVQFGPVVALNPATLLPLPEEGAPHDCLEILAETHGTRPDLTDQPIPDADHTWYTDGSSFLQEGQRKAGAAVTTETEVIWAGALPAGTSAQRAELIALTQALKMAEGKRLNVYTDSRYAFATAHIHGEIYRRRGWLTSEGREIKNKSEILALLKALFLPKRLSIIHCLGHQKGDSAEARGNRLADQAAREAAIKTPPDTSTLLAGKRTADGSEFEKRTADGSEFESPKKKAKVE

SEQ ID NO: 7264 - protein, 2096 aa, synthetic construct
MPAAKRVKLDGGDKKYSIGLDIGTNSVGWAVITDEYKVPSKKFKVLGNTDRHSIKKNLIGALLFDSGETAEATRLKRTARRRYTRRKNRICYLQEIFSNEMAKVDDSFFHRLEESFLVEEDKKHERHPIFGNIVDEVAYHEKYPTIYHLRKKLVDSTDKADLRLIYLALAHMIKFRGHFLIEGDLNPDNSDVDKLFIQLVQTYNQLFEENPINASGVDAKAILSARLSKSRRLENLIAQLPGEKKNGLFGNLIALSLGLTPNFKSNFDLAEDAKLQLSKDTYDDDLDNLLAQIGDQYADLFLAAKNLSDAILLSDILRVNTEITKAPLSASMIKRYDEHHQDLTLLKALVRQQLPEKYKEIFFDQSKNGYAGYIDGGASQEEFYKFIKPILEKMDGTEELLVKLNREDLLRKQRTFDNGSIPHQIHLGELHAILRRQEDFYPFLKDNREKIEKILTFRIPYYVGPLARGNSRFAWMTRKSEETITPWNFEEVVDKGASAQSFIERMTNFDKNLPNEKVLPKHSLLYEYFTVYNELTKVKYVTEGMRKPAFLSGEQKKAIVDLLFKTNRKVTVKQLKEDYFKKIECFDSVEISGVEDRFNASLGTYHDLLKIIKDKDFLDNEENEDILEDIVLTLTLFEDREMIEERLKTYAHLFDDKVMKQLKRRRYTGWGRLSRKLINGIRDKQSGKTILDFLKSDGFANRNFMQLIHDDSLTFKEDIQKAQVSGQGDSLHEHIANLAGSPAIKKGILQTVKVVDELVKVMGRHKPENIVIEMARENQTTQKGQKNSRERMKRIEEGIKELGSQILKEHPVENTQLQNEKLYLYYLQNGRDMYVDQELDINRLSDYDVDHIVPQSFLKDDSIDNKVLTRSDKARGKSDNVPSEEVVKKMKNYWRQLLNAKLITQRKFDNLTKAERGGLSELDKAGFIKRQLVETRQITKHVAQILDSRMNTKYDENDKLIREVKVITLKSKLVSDFRKDFQFYKVREINNYHHAHDAYLNAVVGTALIKKYPKLESEFVYGDYKVYDVRKMIAKSEQEIGKATAKYFFYSNIMNFFKTEITLANGEIRKRPLIETNGETGEIVWDKGRDFATVRKVLSMPQVNIVKKTEVQTGGFSKESILPKRNSDKLIARKKDWDPKKYGGFDSPTVAYSVLVVAKVEKGKSKKLKSVKELLGITIMERSSFEKNPIDFLEAKGYKEVKKDLIIKLPKYSLFELENGRKRMLASAGELQKGNELALPSKYVNFLYLASHYEKLKGSPEDNEQKQLFVEQHKHYLDEIIEQISEFSKRVILADANLDKVLSAYNKHRDKPIREQAENIIHLFTLTNLGAPAAFKYFDTTIDRKRYTSTKEVLDATLIHQSITGLYETRIDLSQLGGDGGPAPEAAAKGGSGGTLNIEDEYRLHETSKGPDVPLGSTWLSDFPQAWAETGGMGLAVRQAPLIIPLKATSTPVSIKQYPMSQEARLGIKPHIQRLLDQGILVPCQSPWNTPLLPVKKPGTNDYRPVQDLREVNKRVEDIHPTVPNPYNLLSGLPPSHQWYTVLDLKDAFFCLRLHPTSQSLFAFEWRDPEMGISGQLTWTRLPQGFKNSPTLFNEALHRDLADFRIQHPDLILLQYVDDLLLAATSELDCQQGTRALLQTLGDLGYRASAKKAQICQKQVKYLGYLLKEGQRWLTEARKETVMGQPTPKTPRQLREFLGTAGFCRLWIPGFAEMAAPLYPLTKPGTLFEWGPDQQKAYQEIKQALLTAPALGLPDLTKPFELFVDEKQGYAKGVLTQKLGPWRRPVAYLSKKLDPVAAGWPPCLRMVAAIAVLTKDAGKLTMGQPLVILAPHAVEALVKQPPDRWLSNARMTHYQALLLDTDRVQFGPIVALNPATLLPLPEEGLQHDCLDILAEAHGTRPDLTDQPLPDADHTWYTDGSSFLQEGQRKAGAAVTTETEVVWAKALPAGTSAQRAELIALTQALKMAEGKKLNVYTDSRYAFATAHIHGEIYRRRGWLTSEGKEIKNKDEILALLKALFLPKRLSIIHCPGHQKGNRAEARGNRMADQAAREVATRETPETSTLLAGKRTADGSEFEKRTADGSEFESPKKKAKVE

SEQ ID NO: 7265 - protein, 2088 aa, synthetic construct; identical to SEQ ID NO: 4529

SEQ ID NO: 7266 - protein, 2090 aa, synthetic construct
MPAAKRVKLDGGDKKYSIGLDIGTNSVGWAVITDEYKVPSKKFKVLGNTDRHSIKKNLIGALLFDSGETAEATRLKRTARRRYTRRKNRICYLQEIFSNEMAKVDDSFFHRLEESFLVEEDKKHERHPIFGNIVDEVAYHEKYPTIYHLRKKLVDSTDKADLRLIYLALAHMIKFRGHFLIEGDLNPDNSDVDKLFIQLVQTYNQLFEENPINASGVDAKAILSARLSKSRRLENLIAQLPGEKKNGLFGNLIALSLGLTPNFKSNFDLAEDAKLQLSKDTYDDDLDNLLAQIGDQYADLFLAAKNLSDAILLSDILRVNTEITKAPLSASMIKRYDEHHQDLTLLKALVRQQLPEKYKEIFFDQSKNGYAGYIDGGASQEEFYKFIKPILEKMDGTEELLVKLNREDLLRKQRTFDNGSIPHQIHLGELHAILRRQEDFYPFLKDNREKIEKILTFRIPYYVGPLARGNSRFAWMTRKSEETITPWNFEEVVDKGASAQSFIERMTNFDKNLPNEKVLPKHSLLYEYFTVYNELTKVKYVTEGMRKPAFLSGEQKKAIVDLLFKTNRKVTVKQLKEDYFKKIECFDSVEISGVEDRFNASLGTYHDLLKIIKDKDFLDNEENEDILEDIVLTLTLFEDREMIEERLKTYAHLFDDKVMKQLKRRRYTGWGRLSRKLINGIRDKQSGKTILDFLKSDGFANRNFMQLIHDDSLTFKEDIQKAQVSGQGDSLHEHIANLAGSPAIKKGILQTVKVVDELVKVMGRHKPENIVIEMARENQTTQKGQKNSRERMKRIEEGIKELGSQILKEHPVENTQLQNEKLYLYYLQNGRDMYVDQELDINRLSDYDVDHIVPQSFLKDDSIDNKVLTRSDKARGKSDNVPSEEVVKKMKNYWRQLLNAKLITQRKFDNLTKAERGGLSELDKAGFIKRQLVETRQITKHVAQILDSRMNTKYDENDKLIREVKVITLKSKLVSDFRKDFQFYKVREINNYHHAHDAYLNAVVGTALIKKYPKLESEFVYGDYKVYDVRKMIAKSEQEIGKATAKYFFYSNIMNFFKTEITLANGEIRKRPLIETNGETGEIVWDKGRDFATVRKVLSMPQVNIVKKTEVQTGGFSKESILPKRNSDKLIARKKDWDPKKYGGFDSPTVAYSVLVVAKVEKGKSKKLKSVKELLGITIMERSSFEKNPIDFLEAKGYKEVKKDLIIKLPKYSLFELENGRKRMLASAGELQKGNELALPSKYVNFLYLASHYEKLKGSPEDNEQKQLFVEQHKHYLDEIIEQISEFSKRVILADANLDKVLSAYNKHRDKPIREQAENIIHLFTLTNLGAPAAFKYFDTTIDRKRYTSTKEVLDATLIHQSITGLYETRIDLSQLGGDGGPAPEAAAKGGSGGTLQLDDEYRLYSPLVKPDQNIQFWLEQFPQAWAETAGMGLAKQVPPQVIQLKASATPVSVRQYPLSKEAQEGIRPHVQRLIQQGILVPVQSPWNTPLLPVRKPGTNDYRPVQDLREVNKRVQDIHPTVPNPYNLLCALPPQRSWYTVLDLKDAFFCLRLHPTSQPLFAFEWRDPGTGRTGQLTWTRLPQGFKNSPTIFDEALHRDLANFRIQHPQVTLLQYVDDLLLAGATKQDCLEGTKALLLELSDLGYRASAKKAQICRREVTYLGYSLRDGQRWLTEARKKTVVQIPAPTTAKQVREFLGTAGFCRLWIPGFATLAAPLYPLTKEKGEFSWAPEHQKAFDAIKKALLSAPALALPDVTKPFTLYVDERKGVARGVLTQTLGPWRRPVAYLSKKLDPVASGWPVCLKAIAAVAILVKDADKLTLGQNITVIAPHALENIVRQPPDRWMTNARMTHYQSLLLTERVTFAPPAALNPATLLPEETDEPVTHDCHQLLIEETGVRKDLTDIPLTGEVLTWFTDGSSYVVEGKRMAGAAVVDGTRTIWASSLPEGTSAQKAELMALTQALRLAEGKSINIYTDSRYAFATAHVHGAIYKQRGLLTSAGREIKNKEEILSLLEALHLPKRLAIIHCPGHQKAKDPISRGNQMADRVAKQAAQGVNLLAGKRTADGSEFEKRTADGSEFESPKKKAKVE

SEQ ID NO: 7267 - protein, 2088 aa, synthetic construct; identical to SEQ ID NO: 4529

SEQ ID NO: 7268 - protein, 2176 aa, synthetic construct
MPAAKRVKLDGGDKKYSIGLDIGTNSVGWAVITDEYKVPSKKFKVLGNTDRHSIKKNLIGALLFDSGETAEATRLKRTARRRYTRRKNRICYLQEIFSNEMAKVDDSFFHRLEESFLVEEDKKHERHPIFGNIVDEVAYHEKYPTIYHLRKKLVDSTDKADLRLIYLALAHMIKFRGHFLIEGDLNPDNSDVDKLFIQLVQTYNQLFEENPINASGVDAKAILSARLSKSRRLENLIAQLPGEKKNGLFGNLIALSLGLTPNFKSNFDLAEDAKLQLSKDTYDDDLDNLLAQIGDQYADLFLAAKNLSDAILLSDILRVNTEITKAPLSASMIKRYDEHHQDLTLLKALVRQQLPEKYKEIFFDQSKNGYAGYIDGGASQEEFYKFIKPILEKMDGTEELLVKLNREDLLRKQRTFDNGSIPHQIHLGELHAILRRQEDFYPFLKDNREKIEKILTFRIPYYVGPLARGNSRFAWMTRKSEETITPWNFEEVVDKGASAQSFIERMTNFDKNLPNEKVLPKHSLLYEYFTVYNELTKVKYVTEGMRKPAFLSGEQKKAIVDLLFKTNRKVTVKQLKEDYFKKIECFDSVEISGVEDRFNASLGTYHDLLKIIKDKDFLDNEENEDILEDIVLTLTLFEDREMIEERLKTYAHLFDDKVMKQLKRRRYTGWGRLSRKLINGIRDKQSGKTILDFLKSDGFANRNFMQLIHDDSLTFKEDIQKAQVSGQGDSLHEHIANLAGSPAIKKGILQTVKVVDELVKVMGRHKPENIVIEMARENQTTQKGQKNSRERMKRIEEGIKELGSQILKEHPVENTQLQNEKLYLYYLQNGRDMYVDQELDINRLSDYDVDHIVPQSFLKDDSIDNKVLTRSDKARGKSDNVPSEEVVKKMKNYWRQLLNAKLITQRKFDNLTKAERGGLSELDKAGFIKRQLVETRQITKHVAQILDSRMNTKYDENDKLIREVKVITLKSKLVSDFRKDFQFYKVREINNYHHAHDAYLNAVVGTALIKKYPKLESEFVYGDYKVYDVRKMIAKSEQEIGKATAKYFFYSNIMNFFKTEITLANGEIRKRPLIETNGETGEIVWDKGRDFATVRKVLSMPQVNIVKKTEVQTGGFSKESILPKRNSDKLIARKKDWDPKKYGGFDSPTVAYSVLVVAKVEKGKSKKLKSVKELLGITIMERSSFEKNPIDFLEAKGYKEVKKDLIIKLPKYSLFELENGRKRMLASAGELQKGNELALPSKYVNFLYLASHYEKLKGSPEDNEQKQLFVEQHKHYLDEIIEQISEFSKRVILADANLDKVLSAYNKHRDKPIREQAENIIHLFTLTNLGAPAAFKYFDTTIDRKRYTSTKEVLDATLIHQSITGLYETRIDLSQLGGDGGPAPEAAAKGGSGGMDPLQLLQPLEAEIKGTKLKAHWNSGATITCVPEAFLEDERPIQTMLIKTIHGEKQQDVYYLTFKVQGRKVEAEVLASPYDYILLNPSDVPWLMKKPLQLTVLVPLHEYQERLLQQTALPKEQKELLQKLFLKYDALWQHWENQVGHRRIKPHNIATGTLAPRPQKQYPINPKAKPSIQIVIDDLLKQGVLIQQNSTMNTPVYPVPKPDGKWRMVLDYREVNKTIPLIAAQNQHSAGILSSIYRGKYKTTLDLTNGFWAHPITPESYWLTAFTWQGKQYCWTRLPQGFLNSPALFTADVVDLLKEIPNVQAYVDDIYISHDDPQEHLEQLEKIFSILLNAGYVVSLKKSEIAQREVEFLGFNITKEGRGLTDTFKQKLLNITPPKDLKQLQSILGLLNFARNFIPNYSELVKPLYTIVANANGKFISWTEDNSNQLQHIISVLNQADNLEERNPETRLIIKVNSSPSAGYIRYYNEGSKRPIMYVNYIFSKAEAKFTQTEKLLTTMHKGLIKAMDLAMGQEILVYSPIVSMTKIQRTPLPERKALPVRWITWMTYLEDPRIQFHYDKSLPELQQIPNVTEDVIAKTKHPSEFAMVFYTDGSAIKHPDVNKSHSAGMGIAQVQFIPEYKIVHQWSIPLGDHTAQLAEIAAVEFACKKALKISGPVLIVTDSFYVAESANKELPYWKSNGFLNNKKKPLRHVSKWKSIAECLQLKPDIIIMHEKGHQQPMTTLHTEGNNLADKLATQGSYVVHAGKRTADGSEFEKRTADGSEFESPKKKAKVE

SEQ ID NO: 7269 - protein, 2087 aa, synthetic construct
MPAAKRVKLDGGDKKYSIGLDIGTNSVGWAVITDEYKVPSKKFKVLGNTDRHSIKKNLIGALLFDSGETAEATRLKRTARRRYTRRKNRICYLQEIFSNEMAKVDDSFFHRLEESFLVEEDKKHERHPIFGNIVDEVAYHEKYPTIYHLRKKLVDSTDKADLRLIYLALAHMIKFRGHFLIEGDLNPDNSDVDKLFIQLVQTYNQLFEENPINASGVDAKAILSARLSKSRRLENLIAQLPGEKKNGLFGNLIALSLGLTPNFKSNFDLAEDAKLQLSKDTYDDDLDNLLAQIGDQYADLFLAAKNLSDAILLSDILRVNTEITKAPLSASMIKRYDEHHQDLTLLKALVRQQLPEKYKEIFFDQSKNGYAGYIDGGASQEEFYKFIKPILEKMDGTEELLVKLNREDLLRKQRTFDNGSIPHQIHLGELHAILRRQEDFYPFLKDNREKIEKILTFRIPYYVGPLARGNSRFAWMTRKSEETITPWNFEEVVDKGASAQSFIERMTNFDKNLPNEKVLPKHSLLYEYFTVYNELTKVKYVTEGMRKPAFLSGEQKKAIVDLLFKTNRKVTVKQLKEDYFKKIECFDSVEISGVEDRFNASLGTYHDLLKIIKDKDFLDNEENEDILEDIVLTLTLFEDREMIEERLKTYAHLFDDKVMKQLKRRRYTGWGRLSRKLINGIRDKQSGKTILDFLKSDGFANRNFMQLIHDDSLTFKEDIQKAQVSGQGDSLHEHIANLAGSPAIKKGILQTVKVVDELVKVMGRHKPENIVIEMARENQTTQKGQKNSRERMKRIEEGIKELGSQILKEHPVENTQLQNEKLYLYYLQNGRDMYVDQELDINRLSDYDVDHIVPQSFLKDDSIDNKVLTRSDKARGKSDNVPSEEVVKKMKNYWRQLLNAKLITQRKFDNLTKAERGGLSELDKAGFIKRQLVETRQITKHVAQILDSRMNTKYDENDKLIREVKVITLKSKLVSDFRKDFQFYKVREINNYHHAHDAYLNAVVGTALIKKYPKLESEFVYGDYKVYDVRKMIAKSEQEIGKATAKYFFYSNIMNFFKTEITLANGEIRKRPLIETNGETGEIVWDKGRDFATVRKVLSMPQVNIVKKTEVQTGGFSKESILPKRNSDKLIARKKDWDPKKYGGFDSPTVAYSVLVVAKVEKGKSKKLKSVKELLGITIMERSSFEKNPIDFLEAKGYKEVKKDLIIKLPKYSLFELENGRKRMLASAGELQKGNELALPSKYVNFLYLASHYEKLKGSPEDNEQKQLFVEQHKHYLDEIIEQISEFSKRVILADANLDKVLSAYNKHRDKPIREQAENIIHLFTLTNLGAPAAFKYFDTTIDRKRYTSTKEVLDATLIHQSITGLYETRIDLSQLGGDGGPAPEAAAKGGSGGIPWLMKKPLQLTTLVPLQEYEERLLKQTMLTGSYKEKLQSLFLKYDALWQHWENQVGHRRIKPHHIATGTVNPRPQKQYPINPKAKASIQTVINDLLKQGVLIQQNSIMNTPVYPVPKPDGKWRMVLDYREVNKTIPLIAAQNQHSAGILSSIFRGKYKTTLDLSNGFWAHSITPESYWLTAFTWLGQQYCWTRLPQGFLNSPALFNADVVDLLKEVPNVQVYVDDIYISHDDPREHLEQLEKVFSLLLNAGYVVSLKKSEIAQHEVEFLGFNITKEGRGLTETFKQKLLNITPPRDLKQLQSILGKLNFARNFIPNFSELVKPLYNIIATAPGKYITWTTDNSQQLQNIISMLNSAENLEERNPEVRLIMKVNTSPSAGYIRFYNEFAKRPIMYLNYVYTKAEVKFTNTEKLLTTIHKGLIKALDLGMGQEILVYSPIVSMTKIQKTPLPERKALPIRWITWMSYLEDPRIQFHYDKTLPELQQVPTVTDDIIAKIKHPSEFSMVFYTDGSAIKHPNVNKSHNAGMGIAQVQFKPEFTVINTWSIPLGDHTAQLAEVAAVEFACKKALKIDGPVLIVTDSFYVAESVNKELPYWQSNGFFNNKKKPLKHVSKWKSIADCIQLKPDIIIIHEKGHQPTASTFHTEGNNLADKLATQGSYVVNAGKRTADGSEFEKRTADGSEFESPKKKAKVE

SEQ ID NO: 7270 - protein, 2176 aa, synthetic construct
MPAAKRVKLDGGDKKYSIGLDIGTNSVGWAVITDEYKVPSKKFKVLGNTDRHSIKKNLIGALLFDSGETAEATRLKRTARRRYTRRKNRICYLQEIFSNEMAKVDDSFFHRLEESFLVEEDKKHERHPIFGNIVDEVAYHEKYPTIYHLRKKLVDSTDKADLRLIYLALAHMIKFRGHFLIEGDLNPDNSDVDKLFIQLVQTYNQLFEENPINASGVDAKAILSARLSKSRRLENLIAQLPGEKKNGLFGNLIALSLGLTPNFKSNFDLAEDAKLQLSKDTYDDDLDNLLAQIGDQYADLFLAAKNLSDAILLSDILRVNTEITKAPLSASMIKRYDEHHQDLTLLKALVRQQLPEKYKEIFFDQSKNGYAGYIDGGASQEEFYKFIKPILEKMDGTEELLVKLNREDLLRKQRTFDNGSIPHQIHLGELHAILRRQEDFYPFLKDNREKIEKILTFRIPYYVGPLARGNSRFAWMTRKSEETITPWNFEEVVDKGASAQSFIERMTNFDKNLPNEKVLPKHSLLYEYFTVYNELTKVKYVTEGMRKPAFLSGEQKKAIVDLLFKTNRKVTVKQLKEDYFKKIECFDSVEISGVEDRFNASLGTYHDLLKIIKDKDFLDNEENEDILEDIVLTLTLFEDREMIEERLKTYAHLFDDKVMKQLKRRRYTGWGRLSRKLINGIRDKQSGKTILDFLKSDGFANRNFMQLIHDDSLTFKEDIQKAQVSGQGDSLHEHIANLAGSPAIKKGILQTVKVVDELVKVMGRHKPENIVIEMARENQTTQKGQKNSRERMKRIEEGIKELGSQILKEHPVENTQLQNEKLYLYYLQNGRDMYVDQELDINRLSDYDVDHIVPQSFLKDDSIDNKVLTRSDKARGKSDNVPSEEVVKKMKNYWRQLLNAKLITQRKFDNLTKAERGGLSELDKAGFIKRQLVETRQITKHVAQILDSRMNTKYDENDKLIREVKVITLKSKLVSDFRKDFQFYKVREINNYHHAHDAYLNAVVGTALIKKYPKLESEFVYGDYKVYDVRKMIAKSEQEIGKATAKYFFYSNIMNFFKTEITLANGEIRKRPLIETNGETGEIVWDKGRDFATVRKVLSMPQVNIVKKTEVQTGGFSKESILPKRNSDKLIARKKDWDPKKYGGFDSPTVAYSVLVVAKVEKGKSKKLKSVKELLGITIMERSSFEKNPIDFLEAKGYKEVKKDLIIKLPKYSLFELENGRKRMLASAGELQKGNELALPSKYVNFLYLASHYEKLKGSPEDNEQKQLFVEQHKHYLDEIIEQISEFSKRVILADANLDKVLSAYNKHRDKPIREQAENIIHLFTLTNLGAPAAFKYFDTTIDRKRYTSTKEVLDATLIHQSITGLYETRIDLSQLGGDGGPAPEAAAKGGSGGMDPLQLLQPLEAEIKGTKLKAHWNSGATITCVPQAFLEEEVPIKNIWIKTIHGEKEQPVYYLTFKIQGRKVEAEVISSPYDYILVSPSDIPWLMKKPLQLTTLVPLQEYEERLLKQTMLTGSYKEKLQSLFLKYDALWQHWENQVGHRRIKPHHIATGTVNPRPQKQYPINPKAKASIQTVINDLLKQGVLIQQNSIMNTPVYPVPKPDGKWRMVLDYREVNKTIPLIAAQNQHSAGILSSIFRGKYKTTLDLSNGFWAHSITPESYWLTAFTWLGQQYCWTRLPQGFLNSPALFNADVVDLLKEVPNVQVYVDDIYISHDDPREHLEQLEKVFSLLLNAGYVVSLKKSEIAQHEVEFLGFNITKEGRGLTETFKQKLLNITPPRDLKQLQSILGKLNFARNFIPNFSELVKPLYNIIATAPGKYITWTTDNSQQLQNIISMLNSAENLEERNPEVRLIMKVNTSPSAGYIRFYNEFAKRPIMYLNYVYTKAEVKFTNTEKLLTTIHKGLIKALDLGMGQEILVYSPIVSMTKIQKTPLPERKALPIRWITWMSYLEDPRIQFHYDKTLPELQQVPTVTDDIIAKIKHPSEFSMVFYTDGSAIKHPNVNKSHNAGMGIAQVQFKPEFTVINTWSIPLGDHTAQLAEVAAVEFACKKALKIDGPVLIVTDSFYVAESVNKELPYWQSNGFFNNKKKPLKHVSKWKSIADCIQLKPDIIIIHEKGHQPTASTFHTEGNNLADKLATQGSYVVNAGKRTADGSEFEKRTADGSEFESPKKKAKVE

SEQ ID NO: 7271 - protein, 2094 aa, synthetic construct
MPAAKRVKLDGGDKKYSIGLDIGTNSVGWAVITDEYKVPSKKFKVLGNTDRHSIKKNLIGALLFDSGETAEATRLKRTARRRYTRRKNRICYLQEIFSNEMAKVDDSFFHRLEESFLVEEDKKHERHPIFGNIVDEVAYHEKYPTIYHLRKKLVDSTDKADLRLIYLALAHMIKFRGHFLIEGDLNPDNSDVDKLFIQLVQTYNQLFEENPINASGVDAKAILSARLSKSRRLENLIAQLPGEKKNGLFGNLIALSLGLTPNFKSNFDLAEDAKLQLSKDTYDDDLDNLLAQIGDQYADLFLAAKNLSDAILLSDILRVNTEITKAPLSASMIKRYDEHHQDLTLLKALVRQQLPEKYKEIFFDQSKNGYAGYIDGGASQEEFYKFIKPILEKMDGTEELLVKLNREDLLRKQRTFDNGSIPHQIHLGELHAILRRQEDFYPFLKDNREKIEKILTFRIPYYVGPLARGNSRFAWMTRKSEETITPWNFEEVVDKGASAQSFIERMTNFDKNLPNEKVLPKHSLLYEYFTVYNELTKVKYVTEGMRKPAFLSGEQKKAIVDLLFKTNRKVTVKQLKEDYFKKIECFDSVEISGVEDRFNASLGTYHDLLKIIKDKDFLDNEENEDILEDIVLTLTLFEDREMIEERLKTYAHLFDDKVMKQLKRRRYTGWGRLSRKLINGIRDKQSGKTILDFLKSDGFANRNFMQLIHDDSLTFKEDIQKAQVSGQGDSLHEHIANLAGSPAIKKGILQTVKVVDELVKVMGRHKPENIVIEMARENQTTQKGQKNSRERMKRIEEGIKELGSQILKEHPVENTQLQNEKLYLYYLQNGRDMYVDQELDINRLSDYDVDHIVPQSFLKDDSIDNKVLTRSDKARGKSDNVPSEEVVKKMKNYWRQLLNAKLITQRKFDNLTKAERGGLSELDKAGFIKRQLVETRQITKHVAQILDSRMNTKYDENDKLIREVKVITLKSKLVSDFRKDFQFYKVREINNYHHAHDAYLNAVVGTALIKKYPKLESEFVYGDYKVYDVRKMIAKSEQEIGKATAKYFFYSNIMNFFKTEITLANGEIRKRPLIETNGETGEIVWDKGRDFATVRKVLSMPQVNIVKKTEVQTGGFSKESILPKRNSDKLIARKKDWDPKKYGGFDSPTVAYSVLVVAKVEKGKSKKLKSVKELLGITIMERSSFEKNPIDFLEAKGYKEVKKDLIIKLPKYSLFELENGRKRMLASAGELQKGNELALPSKYVNFLYLASHYEKLKGSPEDNEQKQLFVEQHKHYLDEIIEQISEFSKRVILADANLDKVLSAYNKHRDKPIREQAENIIHLFTLTNLGAPAAFKYFDTTIDRKRYTSTKEVLDATLIHQSITGLYETRIDLSQLGGDGGPAPEAAAKGGSGGVLNLEEEYRLHEKPVPSSIDPSWLQLFPTVWAERAGMGLANQVPPVVVELRSGASPVAVRQYPMSKEAREGIRPHIQRFLDLGVLVPCQSPWNTPLLPVKKPGTNDYRPVQDLREINKRVQDIHPTVPNPYNLLSSLPPSHTWYSVLDLKDAFFCLKLHPNSQPLFAFEWRDPEKGNTGQLTWTRLPQGFKNSPTLFDEALHRDLAPFRALNPQVVLLQYVDDLLVAAPTYRDCKEGTQKLLQELSKLGYRVSAKKAQLCQKEVTYLGYLLKEGKRWLTPARKATVMKIPPPTTPRQVREFLGTAGFCRLWIPGFASLAAPLYPLTKESIPFIWTEEHQKAFDRIKEALLSAPALALPDLTKPFTLYVDERAGVARGVLTQTLGPWRRPVAYLSKKLDPVASGWPTCLKAVAAVALLLKDADKLTLGQNVTVIASHSLESIVRQPPDRWMTNARMTHYQSLLLNERVSFAPPAVLNPATLLPVESEATPVHRCSEILAEETGTRRDLKDQPLPGVPAWYTDGSSFIAEGKRRAGAAIVDGKRTVWASSLPEGTSAQKAELVALTQALRLAEGKDINIYTDSRYAFATAHIHGAIYKQRGLLTSAGKDIKNKEEILALLEAIHLPKRVAIIHCPGHQKGNDPVATGNRRADEAAKQAALSTRVLAETTKPAGKRTADGSEFEKRTADGSEFESPKKKAKVE

SEQ ID NO: 7272 - protein, 2096 aa, synthetic construct
MPAAKRVKLDGGDKKYSIGLDIGTNSVGWAVITDEYKVPSKKFKVLGNTDRHSIKKNLIGALLFDSGETAEATRLKRTARRRYTRRKNRICYLQEIFSNEMAKVDDSFFHRLEESFLVEEDKKHERHPIFGNIVDEVAYHEKYPTIYHLRKKLVDSTDKADLRLIYLALAHMIKFRGHFLIEGDLNPDNSDVDKLFIQLVQTYNQLFEENPINASGVDAKAILSARLSKSRRLENLIAQLPGEKKNGLFGNLIALSLGLTPNFKSNFDLAEDAKLQLSKDTYDDDLDNLLAQIGDQYADLFLAAKNLSDAILLSDILRVNTEITKAPLSASMIKRYDEHHQDLTLLKALVRQQLPEKYKEIFFDQSKNGYAGYIDGGASQEEFYKFIKPILEKMDGTEELLVKLNREDLLRKQRTFDNGSIPHQIHLGELHAILRRQEDFYPFLKDNREKIEKILTFRIPYYVGPLARGNSRFAWMTRKSEETITPWNFEEVVDKGASAQSFIERMTNFDKNLPNEKVLPKHSLLYEYFTVYNELTKVKYVTEGMRKPAFLSGEQKKAIVDLLFKTNRKVTVKQLKEDYFKKIECFDSVEISGVEDRFNASLGTYHDLLKIIKDKDFLDNEENEDILEDIVLTLTLFEDREMIEERLKTYAHLFDDKVMKQLKRRRYTGWGRLSRKLINGIRDKQSGKTILDFLKSDGFANRNFMQLIHDDSLTFKEDIQKAQVSGQGDSLHEHIANLAGSPAIKKGILQTVKVVDELVKVMGRHKPENIVIEMARENQTTQKGQKNSRERMKRIEEGIKELGSQILKEHPVENTQLQNEKLYLYYLQNGRDMYVDQELDINRLSDYDVDHIVPQSFLKDDSIDNKVLTRSDKARGKSDNVPSEEVVKKMKNYWRQLLNAKLITQRKFDNLTKAERGGLSELDKAGFIKRQLVETRQITKHVAQILDSRMNTKYDENDKLIREVKVITLKSKLVSDFRKDFQFYKVREINNYHHAHDAYLNAVVGTALIKKYPKLESEFVYGDYKVYDVRKMIAKSEQEIGKATAKYFFYSNIMNFFKTEITLANGEIRKRPLIETNGETGEIVWDKGRDFATVRKVLSMPQVNIVKKTEVQTGGFSKESILPKRNSDKLIARKKDWDPKKYGGFDSPTVAYSVLVVAKVEKGKSKKLKSVKELLGITIMERSSFEKNPIDFLEAKGYKEVKKDLIIKLPKYSLFELENGRKRMLASAGELQKGNELALPSKYVNFLYLASHYEKLKGSPEDNEQKQLFVEQHKHYLDEIIEQISEFSKRVILADANLDKVLSAYNKHRDKPIREQAENIIHLFTLTNLGAPAAFKYFDTTIDRKRYTSTKEVLDATLIHQSITGLYETRIDLSQLGGDGGPAPEAAAKGGSGGTLNIEDEYRLHETSKEPDVPLGSTWLSDFPQAWAETGGMGLAVRQAPLIIPLKATSTPVSIKQYPMSQEARLGIKPHIQRLLDQGILVPCQSPWNTPLLPVKKPGTNDYRPVQDLREVNKRVEDIHPTVPNPYNLLSGLPPSHQWYTVLDLKDAFFCLRLHPTSQPLFAFEWRDPEMGISGQLTWTRLPQGFKNSPTLFNEALHRDLADFRIQHPDLILLQYVDDLLLAATSEQDCQRGTRALLQTLGNLGYRASAKKAQICQKQVKYLGYLLKEGQRWLTEARKETVMGQPTPKTPRQLREFLGTAGFCRLWIPGFAEMAAPLYPLTKPGTLFNWGPDQQKAYQEIKQALLTAPALGLPDLTKPFELFVDEKQGYAKGVLTQKLGPWRRPVAYLSKKLDPVAAGWPPCLRMVAAIAVLTKDAGKLTMGQPLVILAPHAVEALVKQPPDRWLSNARMTHYQAMLLDTDRVQFGPVVALNPATLLPLPEKEAPHDCLEILAETHGTRPDLTDQPIPDADYTWYTDGSSFLQEGQRRAGAAVTTETEVIWARALPAGTSAQRAELIALTQALKMAEGKKLNVYTDSRYAFATAHVHGEIYRRRGWLTSEGREIKNKNEILALLKALFLPKRLSIIHCPGHQKGNSAEARGNRMADQAAREAAMKAVLETSTLLAGKRTADGSEFEKRTADGSEFESPKKKAKVE

SEQ ID NO: 7273 - protein, 2098 aa, synthetic construct
MPAAKRVKLDGGDKKYSIGLDIGTNSVGWAVITDEYKVPSKKFKVLGNTDRHSIKKNLIGALLFDSGETAEATRLKRTARRRYTRRKNRICYLQEIFSNEMAKVDDSFFHRLEESFLVEEDKKHERHPIFGNIVDEVAYHEKYPTIYHLRKKLVDSTDKADLRLIYLALAHMIKFRGHFLIEGDLNPDNSDVDKLFIQLVQTYNQLFEENPINASGVDAKAILSARLSKSRRLENLIAQLPGEKKNGLFGNLIALSLGLTPNFKSNFDLAEDAKLQLSKDTYDDDLDNLLAQIGDQYADLFLAAKNLSDAILLSDILRVNTEITKAPLSASMIKRYDEHHQDLTLLKALVRQQLPEKYKEIFFDQSKNGYAGYIDGGASQEEFYKFIKPILEKMDGTEELLVKLNREDLLRKQRTFDNGSIPHQIHLGELHAILRRQEDFYPFLKDNREKIEKILTFRIPYYVGPLARGNSRFAWMTRKSEETITPWNFEEVVDKGASAQSFIERMTNFDKNLPNEKVLPKHSLLYEYFTVYNELTKVKYVTEGMRKPAFLSGEQKKAIVDLLFKTNRKVTVKQLKEDYFKKIECFDSVEISGVEDRFNASLGTYHDLLKIIKDKDFLDNEENEDILEDIVLTLTLFEDREMIEERLKTYAHLFDDKVMKQLKRRRYTGWGRLSRKLINGIRDKQSGKTILDFLKSDGFANRNFMQLIHDDSLTFKEDIQKAQVSGQGDSLHEHIANLAGSPAIKKGILQTVKVVDELVKVMGRHKPENIVIEMARENQTTQKGQKNSRERMKRIEEGIKELGSQILKEHPVENTQLQNEKLYLYYLQNGRDMYVDQELDINRLSDYDVDHIVPQSFLKDDSIDNKVLTRSDKARGKSDNVPSEEVVKKMKNYWRQLLNAKLITQRKFDNLTKAERGGLSELDKAGFIKRQLVETRQITKHVAQILDSRMNTKYDENDKLIREVKVITLKSKLVSDFRKDFQFYKVREINNYHHAHDAYLNAVVGTALIKKYPKLESEFVYGDYKVYDVRKMIAKSEQEIGKATAKYFFYSNIMNFFKTEITLANGEIRKRPLIETNGETGEIVWDKGRDFATVRKVLSMPQVNIVKKTEVQTGGFSKESILPKRNSDKLIARKKDWDPKKYGGFDSPTVAYSVLVVAKVEKGKSKKLKSVKELLGITIMERSSFEKNPIDFLEAKGYKEVKKDLIIKLPKYSLFELENGRKRMLASAGELQKGNELALPSKYVNFLYLASHYEKLKGSPEDNEQKQLFVEQHKHYLDEIIEQISEFSKRVILADANLDKVLSAYNKHRDKPIREQAENIIHLFTLTNLGAPAAFKYFDTTIDRKRYTSTKEVLDATLIHQSITGLYETRIDLSQLGGDGGGGGGSSEAAAKGGTAPLEEEYRLFLEAPIQNVTLLEQWKREIPKVWAEINPPGLASTQAPIHVQLLSTALPVRVRQYPITLEAKRSLRETIRKFRAAGILRPVHSPWNTPLLPVRKSGTSEYRMVQDLREVNKRVETIHPTVPNPYTLLSLLPPDRIWYSVLDLKDAFFCIPLAPESQLIFAFEWADAEEGESGQLTWTRLPQGFKNSPTLFNEALNRDLQGFRLDHPSVSLLQYVDDLLIAADTQAACLSATRDLLMTLAELGYRVSGKKAQLCQEEVTYLGFKIHKGSRSLSNSRTQAILQIPVPKTKRQVREFLGTIGYCRLWIPGFAELAQPLYAATRPGNDPLVWGEKEEEAFQSLKLALTQPPALALPSLDKPFQLFVEETSGAAKGVLTQALGPWKRPVAYLSKRLDPVAAGWPRCLRAIAAAALLTREASKLTFGQDIEITSSHNLESLLRSPPDKWLTNARITQYQVLLLDPPRVRFKQTAALNPATLLPETDDTLPIHHCLDTLDSLTSTRPDLTDQPLAQAEATLFTDGSSYIRDGKRYAGAAVVTLDSVIWAEPLPIGTSAQKAELIALTKALEWSKDKSVNIYTDSRYAFATLHVHGMIYRERGWLTAGGKAIKNAPEILALLTAVWLPKRVAVMHCKGHQKDDAPTSTGNRRADEVAREVAIRPLSTQATISAGKRTADGSEFEKRTADGSEFESPKKKAKVE

SEQ ID NO: 7274 - protein, 2218 aa, synthetic construct
MPAAKRVKLDGGDKKYSIGLDIGTNSVGWAVITDEYKVPSKKFKVLGNTDRHSIKKNLIGALLFDSGETAEATRLKRTARRRYTRRKNRICYLQEIFSNEMAKVDDSFFHRLEESFLVEEDKKHERHPIFGNIVDEVAYHEKYPTIYHLRKKLVDSTDKADLRLIYLALAHMIKFRGHFLIEGDLNPDNSDVDKLFIQLVQTYNQLFEENPINASGVDAKAILSARLSKSRRLENLIAQLPGEKKNGLFGNLIALSLGLTPNFKSNFDLAEDAKLQLSKDTYDDDLDNLLAQIGDQYADLFLAAKNLSDAILLSDILRVNTEITKAPLSASMIKRYDEHHQDLTLLKALVRQQLPEKYKEIFFDQSKNGYAGYIDGGASQEEFYKFIKPILEKMDGTEELLVKLNREDLLRKQRTFDNGSIPHQIHLGELHAILRRQEDFYPFLKDNREKIEKILTFRIPYYVGPLARGNSRFAWMTRKSEETITPWNFEEVVDKGASAQSFIERMTNFDKNLPNEKVLPKHSLLYEYFTVYNELTKVKYVTEGMRKPAFLSGEQKKAIVDLLFKTNRKVTVKQLKEDYFKKIECFDSVEISGVEDRFNASLGTYHDLLKIIKDKDFLDNEENEDILEDIVLTLTLFEDREMIEERLKTYAHLFDDKVMKQLKRRRYTGWGRLSRKLINGIRDKQSGKTILDFLKSDGFANRNFMQLIHDDSLTFKEDIQKAQVSGQGDSLHEHIANLAGSPAIKKGILQTVKVVDELVKVMGRHKPENIVIEMARENQTTQKGQKNSRERMKRIEEGIKELGSQILKEHPVENTQLQNEKLYLYYLQNGRDMYVDQELDINRLSDYDVDHIVPQSFLKDDSIDNKVLTRSDKARGKSDNVPSEEVVKKMKNYWRQLLNAKLITQRKFDNLTKAERGGLSELDKAGFIKRQLVETRQITKHVAQILDSRMNTKYDENDKLIREVKVITLKSKLVSDFRKDFQFYKVREINNYHHAHDAYLNAVVGTALIKKYPKLESEFVYGDYKVYDVRKMIAKSEQEIGKATAKYFFYSNIMNFFKTEITLANGEIRKRPLIETNGETGEIVWDKGRDFATVRKVLSMPQVNIVKKTEVQTGGFSKESILPKRNSDKLIARKKDWDPKKYGGFDSPTVAYSVLVVAKVEKGKSKKLKSVKELLGITIMERSSFEKNPIDFLEAKGYKEVKKDLIIKLPKYSLFELENGRKRMLASAGELQKGNELALPSKYVNFLYLASHYEKLKGSPEDNEQKQLFVEQHKHYLDEIIEQISEFSKRVILADANLDKVLSAYNKHRDKPIREQAENIIHLFTLTNLGAPAAFKYFDTTIDRKRYTSTKEVLDATLIHQSITGLYETRIDLSQLGGDGGGGGGSSEAAAKGGTLGDQGSRGSDPLPEPRVTLTVEGIPTEFLVNTGAEHSVLTKPMGKMGSKRTVVAGATGSKVYPWTTKRLLKIGQKQVTHSFLVIPECPAPLLGRDLLTKLKAQIQFSTEGPQVTWEDRPAMCLVLNLEEEYRLHEKPVPPSIDPSWLQLFPMVWAEKAGMGLANQVPPVVVELKSDASPVAVRQYPMSKEAREGIRPHIQRFLDLGILVPCQSPWNTPLLPVKKPGTNDYRPVQDLREVNKRVQDIHPTVPNPYNLLSSLPPSHTWYSVLDLKDAFFCLKLHPNSQPLFAFEWRDPEKGNTGQLTWTRLPQGFKNSPTLFNEALHRDLASFRALNPQVVMLQYVDDLLVAAPTYRDCKEGTRRLLQELSKLGYRVSAKKAQLCREEVTYLGYLLKGGKRWLTPARKATVMKIPTPTTPRQVREFLGTAGFCRLWIPGFASLAAPLYPLTRPKVPFTWTEAHQEAFGRIKEALLSAPALALPDLTKPFALYVDEKEGVARGVLTQTLGPWRRPVAYLSKKLDPVASGWPTCLKAIAAVALLLKDADKLTLGQNVLVIAPHNLESIVRQPPDRWMTNARMTHYQSLLLNERVSFAPPAILNPATLLPVESDDTPIHICSEILAEETGTRPDLRDQPLPGVPAWYTDGSSFIMDGRRQAGAAIVDNKRTVWASNLPEGTSAQKAELIALTQALRLAEGKSINIYTDSRYAFATAHVHGAIYKQRGWLTSAGKDIKNKEEILALLEAIHLPKRVAIIHCPGHQRGTDPVATGNRKADEAAKQAAQSTRILTETTKNAGKRTADGSEFEKRTADGSEFESPKKKAKVE

SEQ ID NO: 7275 - protein, 2096 aa, synthetic construct
MPAAKRVKLDGGDKKYSIGLDIGTNSVGWAVITDEYKVPSKKFKVLGNTDRHSIKKNLIGALLFDSGETAEATRLKRTARRRYTRRKNRICYLQEIFSNEMAKVDDSFFHRLEESFLVEEDKKHERHPIFGNIVDEVAYHEKYPTIYHLRKKLVDSTDKADLRLIYLALAHMIKFRGHFLIEGDLNPDNSDVDKLFIQLVQTYNQLFEENPINASGVDAKAILSARLSKSRRLENLIAQLPGEKKNGLFGNLIALSLGLTPNFKSNFDLAEDAKLQLSKDTYDDDLDNLLAQIGDQYADLFLAAKNLSDAILLSDILRVNTEITKAPLSASMIKRYDEHHQDLTLLKALVRQQLPEKYKEIFFDQSKNGYAGYIDGGASQEEFYKFIKPILEKMDGTEELLVKLNREDLLRKQRTFDNGSIPHQIHLGELHAILRRQEDFYPFLKDNREKIEKILTFRIPYYVGPLARGNSRFAWMTRKSEETITPWNFEEVVDKGASAQSFIERMTNFDKNLPNEKVLPKHSLLYEYFTVYNELTKVKYVTEGMRKPAFLSGEQKKAIVDLLFKTNRKVTVKQLKEDYFKKIECFDSVEISGVEDRFNASLGTYHDLLKIIKDKDFLDNEENEDILEDIVLTLTLFEDREMIEERLKTYAHLFDDKVMKQLKRRRYTGWGRLSRKLINGIRDKQSGKTILDFLKSDGFANRNFMQLIHDDSLTFKEDIQKAQVSGQGDSLHEHIANLAGSPAIKKGILQTVKVVDELVKVMGRHKPENIVIEMARENQTTQKGQKNSRERMKRIEEGIKELGSQILKEHPVENTQLQNEKLYLYYLQNGRDMYVDQELDINRLSDYDVDHIVPQSFLKDDSIDNKVLTRSDKARGKSDNVPSEEVVKKMKNYWRQLLNAKLITQRKFDNLTKAERGGLSELDKAGFIKRQLVETRQITKHVAQILDSRMNTKYDENDKLIREVKVITLKSKLVSDFRKDFQFYKVREINNYHHAHDAYLNAVVGTALIKKYPKLESEFVYGDYKVYDVRKMIAKSEQEIGKATAKYFFYSNIMNFFKTEITLANGEIRKRPLIETNGETGEIVWDKGRDFATVRKVLSMPQVNIVKKTEVQTGGFSKESILPKRNSDKLIARKKDWDPKKYGGFDSPTVAYSVLVVAKVEKGKSKKLKSVKELLGITIMERSSFEKNPIDFLEAKGYKEVKKDLIIKLPKYSLFELENGRKRMLASAGELQKGNELALPSKYVNFLYLASHYEKLKGSPEDNEQKQLFVEQHKHYLDEIIEQISEFSKRVILADANLDKVLSAYNKHRDKPIREQAENIIHLFTLTNLGAPAAFKYFDTTIDRKRYTSTKEVLDATLIHQSITGLYETRIDLSQLGGDGGGGGGSSEAAAKGGTLNLEDEYRLYETSAEPEVSPGSTWLSDFPQAWAETGGMGLAVRQAPLIIPLKATSTPVSIKQYPMSQEAKLGIKPHIQRLLDQGILVPCQSPWNTPLLPVKKPGTNDYRPVQDLREVNKRVEDIHPTVPNPYNLLSGLPPSHRWYTVLDLKDAFFCLRLHPTSQPLFAFEWRDPGMGISGQLTWTRLPQGFKNSPTLFNEALHRDLADFRIQHPDLILLQYVDDILLAATSELDCQQGTRALLLTLGNLGYRASAKKAQLCQKQVKYLGYLLKEGQRWLTEARKETVMGQPTPKTPRQLREFLGKAGFCRLFIPGFAEMAAPLYPLTKPGTLFNWGPDQQKAYQEIKQALLTAPALGLPDLTKPFELFVDEKQGYAKGVLTQKLGPWRRPVAYLSKKLDPVAAGWPPCLRMVAAIAVLRKDAGKLTMGQPLVILAPHAVEALVKQPPDRWLSNARMTHYQAMLLDTDRVQFGPVVALNPATLLPLPEEGAPHDCLEILAETHGTRPDLTDQPIPDADHTWYTDGSSFLQEGQRKAGAAVTTETEVIWARALPAGTSAQRAELIALTQALKMAEGKRLNVYTDSRYAFATAHIHGEIYRRRGWLTSEGREIKNKSEILALLKALFLPKRLSIIHCLGHQKGDSAEARGNRLADQAAREAAIKTPPDTSTLLAGKRTADGSEFEKRTADGSEFESPKKKAKVE

SEQ ID NO: 7276 - protein, 2096 aa, synthetic construct
MPAAKRVKLDGGDKKYSIGLDIGTNSVGWAVITDEYKVPSKKFKVLGNTDRHSIKKNLIGALLFDSGETAEATRLKRTARRRYTRRKNRICYLQEIFSNEMAKVDDSFFHRLEESFLVEEDKKHERHPIFGNIVDEVAYHEKYPTIYHLRKKLVDSTDKADLRLIYLALAHMIKFRGHFLIEGDLNPDNSDVDKLFIQLVQTYNQLFEENPINASGVDAKAILSARLSKSRRLENLIAQLPGEKKNGLFGNLIALSLGLTPNFKSNFDLAEDAKLQLSKDTYDDDLDNLLAQIGDQYADLFLAAKNLSDAILLSDILRVNTEITKAPLSASMIKRYDEHHQDLTLLKALVRQQLPEKYKEIFFDQSKNGYAGYIDGGASQEEFYKFIKPILEKMDGTEELLVKLNREDLLRKQRTFDNGSIPHQIHLGELHAILRRQEDFYPFLKDNREKIEKILTFRIPYYVGPLARGNSRFAWMTRKSEETITPWNFEEVVDKGASAQSFIERMTNFDKNLPNEKVLPKHSLLYEYFTVYNELTKVKYVTEGMRKPAFLSGEQKKAIVDLLFKTNRKVTVKQLKEDYFKKIECFDSVEISGVEDRFNASLGTYHDLLKIIKDKDFLDNEENEDILEDIVLTLTLFEDREMIEERLKTYAHLFDDKVMKQLKRRRYTGWGRLSRKLINGIRDKQSGKTILDFLKSDGFANRNFMQLIHDDSLTFKEDIQKAQVSGQGDSLHEHIANLAGSPAIKKGILQTVKVVDELVKVMGRHKPENIVIEMARENQTTQKGQKNSRERMKRIEEGIKELGSQILKEHPVENTQLQNEKLYLYYLQNGRDMYVDQELDINRLSDYDVDHIVPQSFLKDDSIDNKVLTRSDKARGKSDNVPSEEVVKKMKNYWRQLLNAKLITQRKFDNLTKAERGGLSELDKAGFIKRQLVETRQITKHVAQILDSRMNTKYDENDKLIREVKVITLKSKLVSDFRKDFQFYKVREINNYHHAHDAYLNAVVGTALIKKYPKLESEFVYGDYKVYDVRKMIAKSEQEIGKATAKYFFYSNIMNFFKTEITLANGEIRKRPLIETNGETGEIVWDKGRDFATVRKVLSMPQVNIVKKTEVQTGGFSKESILPKRNSDKLIARKKDWDPKKYGGFDSPTVAYSVLVVAKVEKGKSKKLKSVKELLGITIMERSSFEKNPIDFLEAKGYKEVKKDLIIKLPKYSLFELENGRKRMLASAGELQKGNELALPSKYVNFLYLASHYEKLKGSPEDNEQKQLFVEQHKHYLDEIIEQISEFSKRVILADANLDKVLSAYNKHRDKPIREQAENIIHLFTLTNLGAPAAFKYFDTTIDRKRYTSTKEVLDATLIHQSITGLYETRIDLSQLGGDGGGGGGSSEAAAKGGTLNIEDEYRLHETSKEPDVSLGSTWLSDFPQAWAETGGMGLAVRQAPLIIPLKATSTPVSIKQYPMSQEARLGIKPHIQRLLDQGILVPCQSPWNTPLLPVKKPGTNDYRPVQDLREVNKRVEDIHPTVPNPYNLLSGLPPSHQWYTVLDLKDAFFCLRLHPTSQPLFAFEWRDPEMGISGQLTWTRLPQGFKNSPTLFNEALHRDLAGFRIQHPDLILLQYVDDLLLAATSELDCQQGTRALLQTLGDLGYRASAKKAQICQKQVKYLGYLLKEGQRWLTEARKETVMGQPIPKTPRQLREFLGTAGFCRLWIPGFAEMAAPLYPLTKPGTLFNWGPDQQKAFQEIKQALLTAPALGLPDLTKPFELFVDEKQGYAKGVLTQKLGPWRRPVAYLSKKLDPVAAGWPPCLRMVAAIAVLTKDAGKLTMGQPLVILAPHAVEALVKQPPDRWLSNARMTHYQALLLDTDRVQFGPVVALNPATLLPLPEEGLQHDCLDILAEAHGTRSDLMDQPLPDADHTWYTDGSSFLQEGQRKAGAAVTTETEVIWARALPAGTSAQRAELIALTQALKMAEGKKLNVYTDSRYAFATAHIHGEIYRRRGWLTSEGKEIKNKDEILALLKALFLPKRLSIIHCPGHQKGNSAEARGNRMADQAAREVATRETPETSTLLAGKRTADGSEFEKRTADGSEFESPKKKAKVE

SEQ ID NO: 7277 - protein, 2096 aa, synthetic construct
MPAAKRVKLDGGDKKYSIGLDIGTNSVGWAVITDEYKVPSKKFKVLGNTDRHSIKKNLIGALLFDSGETAEATRLKRTARRRYTRRKNRICYLQEIFSNEMAKVDDSFFHRLEESFLVEEDKKHERHPIFGNIVDEVAYHEKYPTIYHLRKKLVDSTDKADLRLIYLALAHMIKFRGHFLIEGDLNPDNSDVDKLFIQLVQTYNQLFEENPINASGVDAKAILSARLSKSRRLENLIAQLPGEKKNGLFGNLIALSLGLTPNFKSNFDLAEDAKLQLSKDTYDDDLDNLLAQIGDQYADLFLAAKNLSDAILLSDILRVNTEITKAPLSASMIKRYDEHHQDLTLLKALVRQQLPEKYKEIFFDQSKNGYAGYIDGGASQEEFYKFIKPILEKMDGTEELLVKLNREDLLRKQRTFDNGSIPHQIHLGELHAILRRQEDFYPFLKDNREKIEKILTFRIPYYVGPLARGNSRFAWMTRKSEETITPWNFEEVVDKGASAQSFIERMTNFDKNLPNEKVLPKHSLLYEYFTVYNELTKVKYVTEGMRKPAFLSGEQKKAIVDLLFKTNRKVTVKQLKEDYFKKIECFDSVEISGVEDRFNASLGTYHDLLKIIKDKDFLDNEENEDILEDIVLTLTLFEDREMIEERLKTYAHLFDDKVMKQLKRRRYTGWGRLSRKLINGIRDKQSGKTILDFLKSDGFANRNFMQLIHDDSLTFKEDIQKAQVSGQGDSLHEHIANLAGSPAIKKGILQTVKVVDELVKVMGRHKPENIVIEMARENQTTQKGQKNSRERMKRIEEGIKELGSQILKEHPVENTQLQNEKLYLYYLQNGRDMYVDQELDINRLSDYDVDHIVPQSFLKDDSIDNKVLTRSDKARGKSDNVPSEEVVKKMKNYWRQLLNAKLITQRKFDNLTKAERGGLSELDKAGFIKRQLVETRQITKHVAQILDSRMNTKYDENDKLIREVKVITLKSKLVSDFRKDFQFYKVREINNYHHAHDAYLNAVVGTALIKKYPKLESEFVYGDYKVYDVRKMIAKSEQEIGKATAKYFFYSNIMNFFKTEITLANGEIRKRPLIETNGETGEIVWDKGRDFATVRKVLSMPQVNIVKKTEVQTGGFSKESILPKRNSDKLIARKKDWDPKKYGGFDSPTVAYSVLVVAKVEKGKSKKLKSVKELLGITIMERSSFEKNPIDFLEAKGYKEVKKDLIIKLPKYSLFELENGRKRMLASAGELQKGNELALPSKYVNFLYLASHYEKLKGSPEDNEQKQLFVEQHKHYLDEIIEQISEFSKRVILADANLDKVLSAYNKHRDKPIREQAENIIHLFTLTNLGAPAAFKYFDTTIDRKRYTSTKEVLDATLIHQSITGLYETRIDLSQLGGDGGGGGGSSEAAAKGGTLNIEDEHRLHETSKEPDVSLGSTWLSDFPQAWAETGGMGLAVRQAPLIIPLKATSTPVSIKQYPMSQEARLGIKPHIQRLLDQGILVPCQSPWNTPLLPVKKPGTNDYRPVQDLREVNKRVEDIHPTVPNPYNLLSGLPPSHQWYTVLDLKDAFFCLRLHPTSQPLFAFEWRDPEMGISGQLTWTRLPQGFKNSPTLFDEALHRDLADFRIQHPDLILLQYVDDLLLAATSELDCQQGTRALLQTLGNLGYRASAKKAQICQKQVKYLGYLLKEGQRWLTEARKETVMGQPTPKTPRQLREFLGTAGFCRLWIPGFAEMAAPLYPLTKTGTLFNWGPDQQKAYQEIKQALLTAPALGLPDLTKPFELFVDEKQGYAKGVLTQKLGPWRRPVAYLSKKLDPVAAGWPPCLRMVAAIAVLTKDAGKLTMGQPLVILAPHAVEALVKQPPDRWLSNARMTHYQALLLDTDRVQFGPVVALNPATLLPLPEEGLQHNCLDILAEAHGTRPDLTDQPLPDADHTWYTDGSSLLQEGQRKAGAAVTTETEVIWAKALPAGTSAQRAELIALTQALKMAEGKKLNVYTDSRYAFATAHIHGEIYRRRGLLTSEGKEIKNKDEILALLKALFLPKRLSIIHCPGHQKGHSAEARGNRMADQAARKAAITETPDTSTLLAGKRTADGSEFEKRTADGSEFESPKKKAKVE

SEQ ID NO: 7278 - protein, 2088 aa, synthetic construct
MPAAKRVKLDGGDKKYSIGLDIGTNSVGWAVITDEYKVPSKKFKVLGNTDRHSIKKNLIGALLFDSGETAEATRLKRTARRRYTRRKNRICYLQEIFSNEMAKVDDSFFHRLEESFLVEEDKKHERHPIFGNIVDEVAYHEKYPTIYHLRKKLVDSTDKADLRLIYLALAHMIKFRGHFLIEGDLNPDNSDVDKLFIQLVQTYNQLFEENPINASGVDAKAILSARLSKSRRLENLIAQLPGEKKNGLFGNLIALSLGLTPNFKSNFDLAEDAKLQLSKDTYDDDLDNLLAQIGDQYADLFLAAKNLSDAILLSDILRVNTEITKAPLSASMIKRYDEHHQDLTLLKALVRQQLPEKYKEIFFDQSKNGYAGYIDGGASQEEFYKFIKPILEKMDGTEELLVKLNREDLLRKQRTFDNGSIPHQIHLGELHAILRRQEDFYPFLKDNREKIEKILTFRIPYYVGPLARGNSRFAWMTRKSEETITPWNFEEVVDKGASAQSFIERMTNFDKNLPNEKVLPKHSLLYEYFTVYNELTKVKYVTEGMRKPAFLSGEQKKAIVDLLFKTNRKVTVKQLKEDYFKKIECFDSVEISGVEDRFNASLGTYHDLLKIIKDKDFLDNEENEDILEDIVLTLTLFEDREMIEERLKTYAHLFDDKVMKQLKRRRYTGWGRLSRKLINGIRDKQSGKTILDFLKSDGFANRNFMQLIHDDSLTFKEDIQKAQVSGQGDSLHEHIANLAGSPAIKKGILQTVKVVDELVKVMGRHKPENIVIEMARENQTTQKGQKNSRERMKRIEEGIKELGSQILKEHPVENTQLQNEKLYLYYLQNGRDMYVDQELDINRLSDYDVDHIVPQSFLKDDSIDNKVLTRSDKARGKSDNVPSEEVVKKMKNYWRQLLNAKLITQRKFDNLTKAERGGLSELDKAGFIKRQLVETRQITKHVAQILDSRMNTKYDENDKLIREVKVITLKSKLVSDFRKDFQFYKVREINNYHHAHDAYLNAVVGTALIKKYPKLESEFVYGDYKVYDVRKMIAKSEQEIGKATAKYFFYSNIMNFFKTEITLANGEIRKRPLIETNGETGEIVWDKGRDFATVRKVLSMPQVNIVKKTEVQTGGFSKESILPKRNSDKLIARKKDWDPKKYGGFDSPTVAYSVLVVAKVEKGKSKKLKSVKELLGITIMERSSFEKNPIDFLEAKGYKEVKKDLIIKLPKYSLFELENGRKRMLASAGELQKGNELALPSKYVNFLYLASHYEKLKGSPEDNEQKQLFVEQHKHYLDEIIEQISEFSKRVILADANLDKVLSAYNKHRDKPIREQAENIIHLFTLTNLGAPAAFKYFDTTIDRKRYTSTKEVLDATLIHQSITGLYETRIDLSQLGGDGGGGGGSSEAAAKGGLDDEYRLYSPLVKPDQNIQFWLEQFPQAWAETAGMGLAKQVPPQVIQLKASATPVSVRQYPLSKEAQEGIRPHVQRLIQQGILVPVQSPWNTPLLPVRKPGTNDYRPVQDLREVNKRVQDIHPTVPNPYNLLCALPPQRSWYTVLDLKDAFFCLRLHPTSQPLFAFEWRDPGTGRTGQLTWTRLPQGFKNSPTIFNEALHRDLANFRIQHPQVTLLQYVDDLLLAGATKQDCLEGTKALLLELSDLGYRASAKKAQICRREVTYLGYSLRDGQRWLTEARKKTVVQIPAPTTAKQVREFLGKAGFCRLFIPGFATLAAPLYPLTKPKGEFSWAPEHQKAFDAIKKALLSAPALALPDVTKPFTLYVDERKGVARGVLTQTLGPWRRPVAYLSKKLDPVASGWPVCLKAIAAVAILVKDADKLTLGQNITVIAPHALENIVRQPPDRWMTNARMTHYQSLLLTERVTFAPPAALNPATLLPEETDEPVTHDCHQLLIEETGVRKDLTDIPLTGEVLTWFTDGSSYVVEGKRMAGAAVVDGTRTIWASSLPEGTSAQKAELMALTQALRLAEGKSINIYTDSRYAFATAHVHGAIYKQRGWLTSAGREIKNKEEILSLLEALHLPKRLAIIHCPGHQKAKDPISRGNQMADRVAKQAAQGVNLLPAGKRTADGSEFEKRTADGSEFESPKKKAKVE

SEQ ID NO: 7279 - protein, 2088 aa, synthetic construct; identical to SEQ ID NO: 7278

SEQ ID NO: 7280 - protein, 2090 aa, synthetic construct
MPAAKRVKLDGGDKKYSIGLDIGTNSVGWAVITDEYKVPSKKFKVLGNTDRHSIKKNLIGALLFDSGETAEATRLKRTARRRYTRRKNRICYLQEIFSNEMAKVDDSFFHRLEESFLVEEDKKHERHPIFGNIVDEVAYHEKYPTIYHLRKKLVDSTDKADLRLIYLALAHMIKFRGHFLIEGDLNPDNSDVDKLFIQLVQTYNQLFEENPINASGVDAKAILSARLSKSRRLENLIAQLPGEKKNGLFGNLIALSLGLTPNFKSNFDLAEDAKLQLSKDTYDDDLDNLLAQIGDQYADLFLAAKNLSDAILLSDILRVNTEITKAPLSASMIKRYDEHHQDLTLLKALVRQQLPEKYKEIFFDQSKNGYAGYIDGGASQEEFYKFIKPILEKMDGTEELLVKLNREDLLRKQRTFDNGSIPHQIHLGELHAILRRQEDFYPFLKDNREKIEKILTFRIPYYVGPLARGNSRFAWMTRKSEETITPWNFEEVVDKGASAQSFIERMTNFDKNLPNEKVLPKHSLLYEYFTVYNELTKVKYVTEGMRKPAFLSGEQKKAIVDLLFKTNRKVTVKQLKEDYFKKIECFDSVEISGVEDRFNASLGTYHDLLKIIKDKDFLDNEENEDILEDIVLTLTLFEDREMIEERLKTYAHLFDDKVMKQLKRRRYTGWGRLSRKLINGIRDKQSGKTILDFLKSDGFANRNFMQLIHDDSLTFKEDIQKAQVSGQGDSLHEHIANLAGSPAIKKGILQTVKVVDELVKVMGRHKPENIVIEMARENQTTQKGQKNSRERMKRIEEGIKELGSQILKEHPVENTQLQNEKLYLYYLQNGRDMYVDQELDINRLSDYDVDHIVPQSFLKDDSIDNKVLTRSDKARGKSDNVPSEEVVKKMKNYWRQLLNAKLITQRKFDNLTKAERGGLSELDKAGFIKRQLVETRQITKHVAQILDSRMNTKYDENDKLIREVKVITLKSKLVSDFRKDFQFYKVREINNYHHAHDAYLNAVVGTALIKKYPKLESEFVYGDYKVYDVRKMIAKSEQEIGKATAKYFFYSNIMNFFKTEITLANGEIRKRPLIETNGETGEIVWDKGRDFATVRKVLSMPQVNIVKKTEVQTGGFSKESILPKRNSDKLIARKKDWDPKKYGGFDSPTVAYSVLVVAKVEKGKSKKLKSVKELLGITIMERSSFEKNPIDFLEAKGYKEVKKDLIIKLPKYSLFELENGRKRMLASAGELQKGNELALPSKYVNFLYLASHYEKLKGSPEDNEQKQLFVEQHKHYLDEIIEQISEFSKRVILADANLDKVLSAYNKHRDKPIREQAENIIHLFTLTNLGAPAAFKYFDTTIDRKRYTSTKEVLDATLIHQSITGLYETRIDLSQLGGDGGGGGGSSEAAAKGGTLQLDDEYRLYSPLVKPDQNIQFWLEQFPQAWAETAGMGLAKQVPPQVIQLKASATPVSVRQYPLSKEAQEGIRPHVQRLIQQGILVPVQSPWNTPLLPVRKPGTNDYRPVQDLREVNKRVQDIHPTVPNPYNLLCALPPQRSWYTVLDLKDAFFCLRLHPTSQPLFAFEWRDPGTGRTGQLTWTRLPQGFKNSPTIFDEALHRDLANFRIQHPQVTLLQYVDDLLLAGATKQDCLEGTKALLLELSDLGYRASAKKAQICRREVTYLGYSLRDGQRWLTEARKKTVVQIPAPTTAKQVREFLGTAGFCRLWIPGFATLAAPLYPLTKEKGEFSWAPEHQKAFDAIKKALLSAPALALPDVTKPFTLYVDERKGVARGVLTQTLGPWRRPVAYLSKKLDPVASGWPVCLKAIAAVAILVKDADKLTLGQNITVIAPHALENIVRQPPDRWMTNARMTHYQSLLLTERVTFAPPAALNPATLLPEETDEPVTHDCHQLLIEETGVRKDLTDIPLTGEVLTWFTDGSSYVVEGKRMAGAAVVDGTRTIWASSLPEGTSAQKAELMALTQALRLAEGKSINIYTDSRYAFATAHVHGAIYKQRGLLTSAGREIKNKEEILSLLEALHLPKRLAIIHCPGHQKAKDPISRGNQMADRVAKQAAQGVNLLAGKRTADGSEFEKRTADGSEFESPKKKAKVE

SEQ ID NO: 7281 - protein, 2094 aa, synthetic construct
MPAAKRVKLDGGDKKYSIGLDIGTNSVGWAVITDEYKVPSKKFKVLGNTDRHSIKKNLIGALLFDSGETAEATRLKRTARRRYTRRKNRICYLQEIFSNEMAKVDDSFFHRLEESFLVEEDKKHERHPIFGNIVDEVAYHEKYPTIYHLRKKLVDSTDKADLRLIYLALAHMIKFRGHFLIEGDLNPDNSDVDKLFIQLVQTYNQLFEENPINASGVDAKAILSARLSKSRRLENLIAQLPGEKKNGLFGNLIALSLGLTPNFKSNFDLAEDAKLQLSKDTYDDDLDNLLAQIGDQYADLFLAAKNLSDAILLSDILRVNTEITKAPLSASMIKRYDEHHQDLTLLKALVRQQLPEKYKEIFFDQSKNGYAGYIDGGASQEEFYKFIKPILEKMDGTEELLVKLNREDLLRKQRTFDNGSIPHQIHLGELHAILRRQEDFYPFLKDNREKIEKILTFRIPYYVGPLARGNSRFAWMTRKSEETITPWNFEEVVDKGASAQSFIERMTNFDKNLPNEKVLPKHSLLYEYFTVYNELTKVKYVTEGMRKPAFLSGEQKKAIVDLLFKTNRKVTVKQLKEDYFKKIECFDSVEISGVEDRFNASLGTYHDLLKIIKDKDFLDNEENEDILEDIVLTLTLFEDREMIEERLKTYAHLFDDKVMKQLKRRRYTGWGRLSRKLINGIRDKQSGKTILDFLKSDGFANRNFMQLIHDDSLTFKEDIQKAQVSGQGDSLHEHIANLAGSPAIKKGILQTVKVVDELVKVMGRHKPENIVIEMARENQTTQKGQKNSRERMKRIEEGIKELGSQILKEHPVENTQLQNEKLYLYYLQNGRDMYVDQELDINRLSDYDVDHIVPQSFLKDDSIDNKVLTRSDKARGKSDNVPSEEVVKKMKNYWRQLLNAKLITQRKFDNLTKAERGGLSELDKAGFIKRQLVETRQITKHVAQILDSRMNTKYDENDKLIREVKVITLKSKLVSDFRKDFQFYKVREINNYHHAHDAYLNAVVGTALIKKYPKLESEFVYGDYKVYDVRKMIAKSEQEIGKATAKYFFYSNIMNFFKTEITLANGEIRKRPLIETNGETGEIVWDKGRDFATVRKVLSMPQVNIVKKTEVQTGGFSKESILPKRNSDKLIARKKDWDPKKYGGFDSPTVAYSVLVVAKVEKGKSKKLKSVKELLGITIMERSSFEKNPIDFLEAKGYKEVKKDLIIKLPKYSLFELENGRKRMLASAGELQKGNELALPSKYVNFLYLASHYEKLKGSPEDNEQKQLFVEQHKHYLDEIIEQISEFSKRVILADANLDKVLSAYNKHRDKPIREQAENIIHLFTLTNLGAPAAFKYFDTTIDRKRYTSTKEVLDATLIHQSITGLYETRIDLSQLGGDGGGGGGSSEAAAKGGVLNLEEEYRLHEKPVPSSIDPSWLQLFPTVWAERAGMGLANQVPPVVVELRSGASPVAVRQYPMSKEAREGIRPHIQRFLDLGVLVPCQSPWNTPLLPVKKPGTNDYRPVQDLREINKRVQDIHPTVPNPYNLLSSLPPSHTWYSVLDLKDAFFCLKLHPNSQPLFAFEWRDPEKGNTGQLTWTRLPQGFKNSPTLFNEALHRDLAPFRALNPQVVLLQYVDDLLVAAPTYRDCKEGTQKLLQELSKLGYRVSAKKAQLCQKEVTYLGYLLKEGKRWLTPARKATVMKIPPPTTPRQVREFLGKAGFCRLFIPGFASLAAPLYPLTKPSIPFIWTEEHQKAFDRIKEALLSAPALALPDLTKPFTLYVDERAGVARGVLTQTLGPWRRPVAYLSKKLDPVASGWPTCLKAVAAVALLLKDADKLTLGQNVTVIASHSLESIVRQPPDRWMTNARMTHYQSLLLNERVSFAPPAVLNPATLLPVESEATPVHRCSEILAEETGTRRDLKDQPLPGVPAWYTDGSSFIAEGKRRAGAAIVDGKRTVWASSLPEGTSAQKAELVALTQALRLAEGKDINIYTDSRYAFATAHIHGAIYKQRGWLTSAGKDIKNKEEILALLEAIHLPKRVAIIHCPGHQKGNDPVATGNRRADEAAKQAALSTRVLAETTKPAGKRTADGSEFEKRTADGSEFESPKKKAKVE

SEQ ID NO: 7282 - protein, 2096 aa, synthetic construct
MPAAKRVKLDGGDKKYSIGLDIGTNSVGWAVITDEYKVPSKKFKVLGNTDRHSIKKNLIGALLFDSGETAEATRLKRTARRRYTRRKNRICYLQEIFSNEMAKVDDSFFHRLEESFLVEEDKKHERHPIFGNIVDEVAYHEKYPTIYHLRKKLVDSTDKADLRLIYLALAHMIKFRGHFLIEGDLNPDNSDVDKLFIQLVQTYNQLFEENPINASGVDAKAILSARLSKSRRLENLIAQLPGEKKNGLFGNLIALSLGLTPNFKSNFDLAEDAKLQLSKDTYDDDLDNLLAQIGDQYADLFLAAKNLSDAILLSDILRVNTEITKAPLSASMIKRYDEHHQDLTLLKALVRQQLPEKYKEIFFDQSKNGYAGYIDGGASQEEFYKFIKPILEKMDGTEELLVKLNREDLLRKQRTFDNGSIPHQIHLGELHAILRRQEDFYPFLKDNREKIEKILTFRIPYYVGPLARGNSRFAWMTRKSEETITPWNFEEVVDKGASAQSFIERMTNFDKNLPNEKVLPKHSLLYEYFTVYNELTKVKYVTEGMRKPAFLSGEQKKAIVDLLFKTNRKVTVKQLKEDYFKKIECFDSVEISGVEDRFNASLGTYHDLLKIIKDKDFLDNEENEDILEDIVLTLTLFEDREMIEERLKTYAHLFDDKVMKQLKRRRYTGWGRLSRKLINGIRDKQSGKTILDFLKSDGFANRNFMQLIHDDSLTFKEDIQKAQVSGQGDSLHEHIANLAGSPAIKKGILQTVKVVDELVKVMGRHKPENIVIEMARENQTTQKGQKNSRERMKRIEEGIKELGSQILKEHPVENTQLQNEKLYLYYLQNGRDMYVDQELDINRLSDYDVDHIVPQSFLKDDSIDNKVLTRSDKARGKSDNVPSEEVVKKMKNYWRQLLNAKLITQRKFDNLTKAERGGLSELDKAGFIKRQLVETRQITKHVAQILDSRMNTKYDENDKLIREVKVITLKSKLVSDFRKDFQFYKVREINNYHHAHDAYLNAVVGTALIKKYPKLESEFVYGDYKVYDVRKMIAKSEQEIGKATAKYFFYSNIMNFFKTEITLANGEIRKRPLIETNGETGEIVWDKGRDFATVRKVLSMPQVNIVKKTEVQTGGFSKESILPKRNSDKLIARKKDWDPKKYGGFDSPTVAYSVLVVAKVEKGKSKKLKSVKELLGITIMERSSFEKNPIDFLEAKGYKEVKKDLIIKLPKYSLFELENGRKRMLASAGELQKGNELALPSKYVNFLYLASHYEKLKGSPEDNEQKQLFVEQHKHYLDEIIEQISEFSKRVILADANLDKVLSAYNKHRDKPIREQAENIIHLFTLTNLGAPAAFKYFDTTIDRKRYTSTKEVLDATLIHQSITGLYETRIDLSQLGGDGGGGGGSSEAAAKGGTLNIEDEYRLHETSKEPDVPLGSTWLSDFPQAWAETGGMGLAVRQAPLIIPLKATSTPVSIKQYPMSQEARLGIKPHIQRLLDQGILVPCQSPWNTPLLPVKKPGTNDYRPVQDLREVNKRVEDIHPTVPNPYNLLSGLPPSHQWYTVLDLKDAFFCLRLHPTSQPLFAFEWRDPEMGISGQLTWTRLPQGFKNSPTLFNEALHRDLADFRIQHPDLILLQYVDDLLLAATSEQDCQRGTRALLQTLGNLGYRASAKKAQICQKQVKYLGYLLKEGQRWLTEARKETVMGQPTPKTPRQLREFLGTAGFCRLWIPGFAEMAAPLYPLTKPGTLFNWGPDQQKAYQEIKQALLTAPALGLPDLTKPFELFVDEKQGYAKGVLTQKLGPWRRPVAYLSKKLDPVAAGWPPCLRMVAAIAVLTKDAGKLTMGQPLVILAPHAVEALVKQPPDRWLSNARMTHYQAMLLDTDRVQFGPVVALNPATLLPLPEKEAPHDCLEILAETHGTRPDLTDQPIPDADYTWYTDGSSFLQEGQRRAGAAVTTETEVIWARALPAGTSAQRAELIALTQALKMAEGKKLNVYTDSRYAFATAHVHGEIYRRRGWLTSEGREIKNKNEILALLKALFLPKRLSIIHCPGHQKGNSAEARGNRMADQAAREAAMKAVLETSTLLAGKRTADGSEFEKRTADGSEFESPKKKAKVE

SEQ ID NO: 7283 - protein, 2173 aa, synthetic construct
MPAAKRVKLDGGDKKYSIGLDIGTNSVGWAVITDEYKVPSKKFKVLGNTDRHSIKKNLIGALLFDSGETAEATRLKRTARRRYTRRKNRICYLQEIFSNEMAKVDDSFFHRLEESFLVEEDKKHERHPIFGNIVDEVAYHEKYPTIYHLRKKLVDSTDKADLRLIYLALAHMIKFRGHFLIEGDLNPDNSDVDKLFIQLVQTYNQLFEENPINASGVDAKAILSARLSKSRRLENLIAQLPGEKKNGLFGNLIALSLGLTPNFKSNFDLAEDAKLQLSKDTYDDDLDNLLAQIGDQYADLFLAAKNLSDAILLSDILRVNTEITKAPLSASMIKRYDEHHQDLTLLKALVRQQLPEKYKEIFFDQSKNGYAGYIDGGASQEEFYKFIKPILEKMDGTEELLVKLNREDLLRKQRTFDNGSIPHQIHLGELHAILRRQEDFYPFLKDNREKIEKILTFRIPYYVGPLARGNSRFAWMTRKSEETITPWNFEEVVDKGASAQSFIERMTNFDKNLPNEKVLPKHSLLYEYFTVYNELTKVKYVTEGMRKPAFLSGEQKKAIVDLLFKTNRKVTVKQLKEDYFKKIECFDSVEISGVEDRFNASLGTYHDLLKIIKDKDFLDNEENEDILEDIVLTLTLFEDREMIEERLKTYAHLFDDKVMKQLKRRRYTGWGRLSRKLINGIRDKQSGKTILDFLKSDGFANRNFMQLIHDDSLTFKEDIQKAQVSGQGDSLHEHIANLAGSPAIKKGILQTVKVVDELVKVMGRHKPENIVIEMARENQTTQKGQKNSRERMKRIEEGIKELGSQILKEHPVENTQLQNEKLYLYYLQNGRDMYVDQELDINRLSDYDVDHIVPQSFLKDDSIDNKVLTRSDKARGKSDNVPSEEVVKKMKNYWRQLLNAKLITQRKFDNLTKAERGGLSELDKAGFIKRQLVETRQITKHVAQILDSRMNTKYDENDKLIREVKVITLKSKLVSDFRKDFQFYKVREINNYHHAHDAYLNAVVGTALIKKYPKLESEFVYGDYKVYDVRKMIAKSEQEIGKATAKYFFYSNIMNFFKTEITLANGEIRKRPLIETNGETGEIVWDKGRDFATVRKVLSMPQVNIVKKTEVQTGGFSKESILPKRNSDKLIARKKDWDPKKYGGFDSPTVAYSVLVVAKVEKGKSKKLKSVKELLGITIMERSSFEKNPIDFLEAKGYKEVKKDLIIKLPKYSLFELENGRKRMLASAGELQKGNELALPSKYVNFLYLASHYEKLKGSPEDNEQKQLFVEQHKHYLDEIIEQISEFSKRVILADANLDKVLSAYNKHRDKPIREQAENIIHLFTLTNLGAPAAFKYFDTTIDRKRYTSTKEVLDATLIHQSITGLYETRIDLSQLGGDGGGGGEAAAKGSSGGMDLLKPLTVERKGVKIKGYWNSQADITCVPKDLLQGEEPVRQQNVTTIHGTQEGDVYYVNLKIDGRRINTEVIGTTLDYAIITPGDVPWILKKPLELTIKLDLEEQQGTLLNNSILSKKGKEELKQLFEKYSALWQSWENQVGHRRIRPHKIATGTVKPTPQKQYHINPKAKPDIQIVINDLLKQGVLIQKESTMNTPVYPVPKPNGRWRMVLDYRAVNKVTPLIAVQNQHSYGILGSLFKGRYKTTIDLSNGFWAHPIVPEDYWITAFTWQGKQYCWTVLPQGFLNSPGLFNGDVVDLLQGIPNVEVYVDDVYISHDSEKEHLEYLDILFNRLKEAGYIISLKKSNIANSIVDFLGFQITNEGRGLTDTFKEKLENITAPTTLKQLQSILGKLNFARNFIPDFTELIAPLYALIPKSPKNYVPWQIEHSTTLETLITKLNGAEYLQGRKGDKTLIMKVNASYTTGYIRYYNEGEKKPISYVSIVFSKTELKFTELEKLLTTVHKGLLKALDLSMGQNIHVYSPIVSMQNIQKTPQTAKKALASRWLSWLSYLEDPRIRFFYDPQMPALKDLPAVDTGKDNKKHPSNFQHIFYTDGSAITSPTKEGHLNAGMGIVYFINKDGNLQKQQEWSISLGNHTAQFAEIAAFEFALKKCLPLGGNILVVTDSNYVAKAYNEELDVWASNGFVNNRKKPLKHISKWKSVADLKRLRPDVVVTHEPGHQKLDSSPHAYGNNLADQLATQASFKVHAGKRTADGSEFEKRTADGSEFESPKKKAKVE

SEQ ID NO: 7284 - protein, 2095 aa, synthetic construct
MPAAKRVKLDGGDKKYSIGLDIGTNSVGWAVITDEYKVPSKKFKVLGNTDRHSIKKNLIGALLFDSGETAEATRLKRTARRRYTRRKNRICYLQEIFSNEMAKVDDSFFHRLEESFLVEEDKKHERHPIFGNIVDEVAYHEKYPTIYHLRKKLVDSTDKADLRLIYLALAHMIKFRGHFLIEGDLNPDNSDVDKLFIQLVQTYNQLFEENPINASGVDAKAILSARLSKSRRLENLIAQLPGEKKNGLFGNLIALSLGLTPNFKSNFDLAEDAKLQLSKDTYDDDLDNLLAQIGDQYADLFLAAKNLSDAILLSDILRVNTEITKAPLSASMIKRYDEHHQDLTLLKALVRQQLPEKYKEIFFDQSKNGYAGYIDGGASQEEFYKFIKPILEKMDGTEELLVKLNREDLLRKQRTFDNGSIPHQIHLGELHAILRRQEDFYPFLKDNREKIEKILTFRIPYYVGPLARGNSRFAWMTRKSEETITPWNFEEVVDKGASAQSFIERMTNFDKNLPNEKVLPKHSLLYEYFTVYNELTKVKYVTEGMRKPAFLSGEQKKAIVDLLFKTNRKVTVKQLKEDYFKKIECFDSVEISGVEDRFNASLGTYHDLLKIIKDKDFLDNEENEDILEDIVLTLTLFEDREMIEERLKTYAHLFDDKVMKQLKRRRYTGWGRLSRKLINGIRDKQSGKTILDFLKSDGFANRNFMQLIHDDSLTFKEDIQKAQVSGQGDSLHEHIANLAGSPAIKKGILQTVKVVDELVKVMGRHKPENIVIEMARENQTTQKGQKNSRERMKRIEEGIKELGSQILKEHPVENTQLQNEKLYLYYLQNGRDMYVDQELDINRLSDYDVDHIVPQSFLKDDSIDNKVLTRSDKARGKSDNVPSEEVVKKMKNYWRQLLNAKLITQRKFDNLTKAERGGLSELDKAGFIKRQLVETRQITKHVAQILDSRMNTKYDENDKLIREVKVITLKSKLVSDFRKDFQFYKVREINNYHHAHDAYLNAVVGTALIKKYPKLESEFVYGDYKVYDVRKMIAKSEQEIGKATAKYFFYSNIMNFFKTEITLANGEIRKRPLIETNGETGEIVWDKGRDFATVRKVLSMPQVNIVKKTEVQTGGFSKESILPKRNSDKLIARKKDWDPKKYGGFDSPTVAYSVLVVAKVEKGKSKKLKSVKELLGITIMERSSFEKNPIDFLEAKGYKEVKKDLIIKLPKYSLFELENGRKRMLASAGELQKGNELALPSKYVNFLYLASHYEKLKGSPEDNEQKQLFVEQHKHYLDEIIEQISEFSKRVILADANLDKVLSAYNKHRDKPIREQAENIIHLFTLTNLGAPAAFKYFDTTIDRKRYTSTKEVLDATLIHQSITGLYETRIDLSQLGGDGGGGGEAAAKGSSGGTLQLEEEYRLFEPESTQKQEMDIWLKNFPQAWAETGGMGTAHCQAPVLIQLKATATPISIRQYPMPHEAYQGIKPHIRRMLDQGILKPCQSPWNTPLLPVKKPGTEDYRPVQDLREVNKRVEDIHPTVPNPYNLLSTLPPSHPWYTVLDLKDAFFCLRLHSESQLLFAFEWRDPEIGLSGQLTWTRLPQGFKNSPTLFNEALHSDLADFRVRYPALVLLQYVDDLLLAAATRTECLEGTKALLETLGNKGYRASAKKAQICLQEVTYLGYSLKDGQRWLTKARKEAILSIPVPKNSRQVREFLGKAGYCRLFIPGFAELAAPLYPLTRPGTLFQWGTEQQLAFEDIKKALLSSPALGLPDITKPFELFIDENSGFAKGVLVQKLGPWKRPVAYLSKKLDTVASGWPPCLRMVAAIAILVKDAGKLTLGQPLTILTSHPVEALVRQPPNKWLSNARMTHYQAMLLDAERVHFGPTVSLNPATLLPLPSGGNHHDCLQILAETHGTRPDLTDQPLPDADLTWYTDGSSFIRNGEREAGAAVTTESEVIWAAPLPPGTSAQRAELIALTQALKMAEGKKLTVYTDSRYAFATTHVHGEIYRRRGWLTSEGKEIKNKNEILALLEALFLPKRLSIIHCPGHQKGDSPQAKGNRLADDTAKKAATETHSSLTVLPAGKRTADGSEFEKRTADGSEFESPKKKAKVE

SEQ ID NO: 7285 - protein, 2176 aa, synthetic construct
MPAAKRVKLDGGDKKYSIGLDIGTNSVGWAVITDEYKVPSKKFKVLGNTDRHSIKKNLIGALLFDSGETAEATRLKRTARRRYTRRKNRICYLQEIFSNEMAKVDDSFFHRLEESFLVEEDKKHERHPIFGNIVDEVAYHEKYPTIYHLRKKLVDSTDKADLRLIYLALAHMIKFRGHFLIEGDLNPDNSDVDKLFIQLVQTYNQLFEENPINASGVDAKAILSARLSKSRRLENLIAQLPGEKKNGLFGNLIALSLGLTPNFKSNFDLAEDAKLQLSKDTYDDDLDNLLAQIGDQYADLFLAAKNLSDAILLSDILRVNTEITKAPLSASMIKRYDEHHQDLTLLKALVRQQLPEKYKEIFFDQSKNGYAGYIDGGASQEEFYKFIKPILEKMDGTEELLVKLNREDLLRKQRTFDNGSIPHQIHLGELHAILRRQEDFYPFLKDNREKIEKILTFRIPYYVGPLARGNSRFAWMTRKSEETITPWNFEEVVDKGASAQSFIERMTNFDKNLPNEKVLPKHSLLYEYFTVYNELTKVKYVTEGMRKPAFLSGEQKKAIVDLLFKTNRKVTVKQLKEDYFKKIECFDSVEISGVEDRFNASLGTYHDLLKIIKDKDFLDNEENEDILEDIVLTLTLFEDREMIEERLKTYAHLFDDKVMKQLKRRRYTGWGRLSRKLINGIRDKQSGKTILDFLKSDGFANRNFMQLIHDDSLTFKEDIQKAQVSGQGDSLHEHIANLAGSPAIKKGILQTVKVVDELVKVMGRHKPENIVIEMARENQTTQKGQKNSRERMKRIEEGIKELGSQILKEHPVENTQLQNEKLYLYYLQNGRDMYVDQELDINRLSDYDVDHIVPQSFLKDDSIDNKVLTRSDKARGKSDNVPSEEVVKKMKNYWRQLLNAKLITQRKFDNLTKAERGGLSELDKAGFIKRQLVETRQITKHVAQILDSRMNTKYDENDKLIREVKVITLKSKLVSDFRKDFQFYKVREINNYHHAHDAYLNAVVGTALIKKYPKLESEFVYGDYKVYDVRKMIAKSEQEIGKATAKYFFYSNIMNFFKTEITLANGEIRKRPLIETNGETGEIVWDKGRDFATVRKVLSMPQVNIVKKTEVQTGGFSKESILPKRNSDKLIARKKDWDPKKYGGFDSPTVAYSVLVVAKVEKGKSKKLKSVKELLGITIMERSSFEKNPIDFLEAKGYKEVKKDLIIKLPKYSLFELENGRKRMLASAGELQKGNELALPSKYVNFLYLASHYEKLKGSPEDNEQKQLFVEQHKHYLDEIIEQISEFSKRVILADANLDKVLSAYNKHRDKPIREQAENIIHLFTLTNLGAPAAFKYFDTTIDRKRYTSTKEVLDATLIHQSITGLYETRIDLSQLGGDGGGGGEAAAKGSSGGMNPLQLLQPLPAEIKGTKLLAHWNSGATITCIPESFLEDEQPIKKTLIKTIHGEKQQNVYYVTFKVKGRKVEAEVIASPYEYILLSPTDVPWLTQQPLQLTILVPLQEYQEKILSKTALPEDQKQQLKTLFVKYDNLWQHWENQVGHRKIRPHNIATGDYPPRPQKQYPINPKAKPSIQIVIDDLLKQGVLTPQNSTMNTPVYPVPKPDGRWRMVLDYREVNKTIPLTAAQNQHSAGILATIVRQKYKTTLDLANGFWAHPITPESYWLTAFTWQGKQYCWTRLPQGFLNSPALFTADVVDLLKEIPNVQVYVDDIYLSHDDPKEHVQQLEKVFQILLQAGYVVSLKKSEIGQKTVEFLGFNITKEGRGLTDTFKTKLLNITPPKDLKQLQSILGLLNFARNFIPNFAELVQPLYNLIASAKGKYIEWSEENTKQLNMVIEALNTASNLEERLPEQRLVIKVNTSPSAGYVRYYNETGKKPIMYLNYVFSKAELKFSMLEKLLTTMHKALIKAMDLAMGQEILVYSPIVSMTKIQKTPLPERKALPIRWITWMTYLEDPRIQFHYDKTLPELKHIPDVYTSSQSPVKHPSQYEGVFYTDGSAIKSPDPTKSNNAGMGIVHATYKPEYQVLNQWSIPLGNHTAQMAEIAAVEFACKKALKIPGPVLVITDSFYVAESANKELPYWKSNGFVNNKKKPLKHISKWKSIAECLSMKPDITIQHEKGISLQIPVFILKGNALADKLATQGSYVVNAGKRTADGSEFEKRTADGSEFESPKKKAKVE

SEQ ID NO: 7286 - protein, 2127 aa, synthetic construct
MPAAKRVKLDGGDKKYSIGLDIGTNSVGWAVITDEYKVPSKKFKVLGNTDRHSIKKNLIGALLFDSGETAEATRLKRTARRRYTRRKNRICYLQEIFSNEMAKVDDSFFHRLEESFLVEEDKKHERHPIFGNIVDEVAYHEKYPTIYHLRKKLVDSTDKADLRLIYLALAHMIKFRGHFLIEGDLNPDNSDVDKLFIQLVQTYNQLFEENPINASGVDAKAILSARLSKSRRLENLIAQLPGEKKNGLFGNLIALSLGLTPNFKSNFDLAEDAKLQLSKDTYDDDLDNLLAQIGDQYADLFLAAKNLSDAILLSDILRVNTEITKAPLSASMIKRYDEHHQDLTLLKALVRQQLPEKYKEIFFDQSKNGYAGYIDGGASQEEFYKFIKPILEKMDGTEELLVKLNREDLLRKQRTFDNGSIPHQIHLGELHAILRRQEDFYPFLKDNREKIEKILTFRIPYYVGPLARGNSRFAWMTRKSEETITPWNFEEVVDKGASAQSFIERMTNFDKNLPNEKVLPKHSLLYEYFTVYNELTKVKYVTEGMRKPAFLSGEQKKAIVDLLFKTNRKVTVKQLKEDYFKKIECFDSVEISGVEDRFNASLGTYHDLLKIIKDKDFLDNEENEDILEDIVLTLTLFEDREMIEERLKTYAHLFDDKVMKQLKRRRYTGWGRLSRKLINGIRDKQSGKTILDFLKSDGFANRNFMQLIHDDSLTFKEDIQKAQVSGQGDSLHEHIANLAGSPAIKKGILQTVKVVDELVKVMGRHKPENIVIEMARENQTTQKGQKNSRERMKRIEEGIKELGSQILKEHPVENTQLQNEKLYLYYLQNGRDMYVDQELDINRLSDYDVDHIVPQSFLKDDSIDNKVLTRSDKARGKSDNVPSEEVVKKMKNYWRQLLNAKLITQRKFDNLTKAERGGLSELDKAGFIKRQLVETRQITKHVAQILDSRMNTKYDENDKLIREVKVITLKSKLVSDFRKDFQFYKVREINNYHHAHDAYLNAVVGTALIKKYPKLESEFVYGDYKVYDVRKMIAKSEQEIGKATAKYFFYSNIMNFFKTEITLANGEIRKRPLIETNGETGEIVWDKGRDFATVRKVLSMPQVNIVKKTEVQTGGFSKESILPKRNSDKLIARKKDWDPKKYGGFDSPTVAYSVLVVAKVEKGKSKKLKSVKELLGITIMERSSFEKNPIDFLEAKGYKEVKKDLIIKLPKYSLFELENGRKRMLASAGELQKGNELALPSKYVNFLYLASHYEKLKGSPEDNEQKQLFVEQHKHYLDEIIEQISEFSKRVILADANLDKVLSAYNKHRDKPIREQAENIIHLFTLTNLGAPAAFKYFDTTIDRKRYTSTKEVLDATLIHQSITGLYETRIDLSQLGGDGGGGGEAAAKGSSGGLLGRDLLTKLKAQIQFSTEGPQVTWEDRPAMCLVLNLEEEYRLHEKPVPPSIDPSWLQLFPMVWAEKAGMGLANQVPPVVVELKSDASPVAVRQYPMSKEAREGIRPHIQRFLDLGILVPCQSPWNTPLLPVKKPGTNDYRPVQDLREVNKRVQDIHPTVPNPYNLLSSLPPSHTWYSVLDLKDAFFCLKLHPNSQPLFAFEWRDPEKGNTGQLTWTRLPQGFKNSPTLFNEALHRDLASFRALNPQVVMLQYVDDLLVAAPTYRDCKEGTRRLLQELSKLGYRVSAKKAQLCREEVTYLGYLLKGGKRWLTPARKATVMKIPTPTTPRQVREFLGTAGFCRLWIPGFASLAAPLYPLTRPKVPFTWTEAHQEAFGRIKEALLSAPALALPDLTKPFALYVDEKEGVARGVLTQTLGPWRRPVAYLSKKLDPVASGWPTCLKAIAAVALLLKDADKLTLGQNVLVIAPHNLESIVRQPPDRWMTNARMTHYQSLLLNERVSFAPPAILNPATLLPVESDDTPIHICSEILAEETGTRPDLRDQPLPGVPAWYTDGSSFIMDGRRQAGAAIVDNKRTVWASNLPEGTSAQKAELIALTQALRLAEGKSINIYTDSRYAFATAHVHGAIYKQRGWLTSAGKDIKNKEEILALLEAIHLPKRVAIIHCPGHQRGTDPVATGNRKADEAAKQAAQSTRILTETTKNAGKRTADGSEFEKRTADGSEFESPKKKAKVE

SEQ ID NO: 7287 - protein, 2218 aa, synthetic construct
MPAAKRVKLDGGDKKYSIGLDIGTNSVGWAVITDEYKVPSKKFKVLGNTDRHSIKKNLIGALLFDSGETAEATRLKRTARRRYTRRKNRICYLQEIFSNEMAKVDDSFFHRLEESFLVEEDKKHERHPIFGNIVDEVAYHEKYPTIYHLRKKLVDSTDKADLRLIYLALAHMIKFRGHFLIEGDLNPDNSDVDKLFIQLVQTYNQLFEENPINASGVDAKAILSARLSKSRRLENLIAQLPGEKKNGLFGNLIALSLGLTPNFKSNFDLAEDAKLQLSKDTYDDDLDNLLAQIGDQYADLFLAAKNLSDAILLSDILRVNTEITKAPLSASMIKRYDEHHQDLTLLKALVRQQLPEKYKEIFFDQSKNGYAGYIDGGASQEEFYKFIKPILEKMDGTEELLVKLNREDLLRKQRTFDNGSIPHQIHLGELHAILRRQEDFYPFLKDNREKIEKILTFRIPYYVGPLARGNSRFAWMTRKSEETITPWNFEEVVDKGASAQSFIERMTNFDKNLPNEKVLPKHSLLYEYFTVYNELTKVKYVTEGMRKPAFLSGEQKKAIVDLLFKTNRKVTVKQLKEDYFKKIECFDSVEISGVEDRFNASLGTYHDLLKIIKDKDFLDNEENEDILEDIVLTLTLFEDREMIEERLKTYAHLFDDKVMKQLKRRRYTGWGRLSRKLINGIRDKQSGKTILDFLKSDGFANRNFMQLIHDDSLTFKEDIQKAQVSGQGDSLHEHIANLAGSPAIKKGILQTVKVVDELVKVMGRHKPENIVIEMARENQTTQKGQKNSRERMKRIEEGIKELGSQILKEHPVENTQLQNEKLYLYYLQNGRDMYVDQELDINRLSDYDVDHIVPQSFLKDDSIDNKVLTRSDKARGKSDNVPSEEVVKKMKNYWRQLLNAKLITQRKFDNLTKAERGGLSELDKAGFIKRQLVETRQITKHVAQILDSRMNTKYDENDKLIREVKVITLKSKLVSDFRKDFQFYKVREINNYHHAHDAYLNAVVGTALIKKYPKLESEFVYGDYKVYDVRKMIAKSEQEIGKATAKYFFYSNIMNFFKTEITLANGEIRKRPLIETNGETGEIVWDKGRDFATVRKVLSMPQVNIVKKTEVQTGGFSKESILPKRNSDKLIARKKDWDPKKYGGFDSPTVAYSVLVVAKVEKGKSKKLKSVKELLGITIMERSSFEKNPIDFLEAKGYKEVKKDLIIKLPKYSLFELENGRKRMLASAGELQKGNELALPSKYVNFLYLASHYEKLKGSPEDNEQKQLFVEQHKHYLDEIIEQISEFSKRVILADANLDKVLSAYNKHRDKPIREQAENIIHLFTLTNLGAPAAFKYFDTTIDRKRYTSTKEVLDATLIHQSITGLYETRIDLSQLGGDGGGGGEAAAKGSSGGTLGDQGSRGSDPLPEPRVTLTVEGIPTEFLVNTGAEHSVLTKPMGKMGSKRTVVAGATGSKVYPWTTKRLLKIGQKQVTHSFLVIPECPAPLLGRDLLTKLKAQIQFSTEGPQVTWEDRPAMCLVLNLEEEYRLHEKPVPPSIDPSWLQLFPMVWAEKAGMGLANQVPPVVVELKSDASPVAVRQYPMSKEAREGIRPHIQRFLDLGILVPCQSPWNTPLLPVKKPGTNDYRPVQDLREVNKRVQDIHPTVPNPYNLLSSLPPSHTWYSVLDLKDAFFCLKLHPNSQPLFAFEWRDPEKGNTGQLTWTRLPQGFKNSPTLFNEALHRDLASFRALNPQVVMLQYVDDLLVAAPTYRDCKEGTRRLLQELSKLGYRVSAKKAQLCREEVTYLGYLLKGGKRWLTPARKATVMKIPTPTTPRQVREFLGTAGFCRLWIPGFASLAAPLYPLTRPKVPFTWTEAHQEAFGRIKEALLSAPALALPDLTKPFALYVDEKEGVARGVLTQTLGPWRRPVAYLSKKLDPVASGWPTCLKAIAAVALLLKDADKLTLGQNVLVIAPHNLESIVRQPPDRWMTNARMTHYQSLLLNERVSFAPPAILNPATLLPVESDDTPIHICSEILAEETGTRPDLRDQPLPGVPAWYTDGSSFIMDGRRQAGAAIVDNKRTVWASNLPEGTSAQKAELIALTQALRLAEGKSINIYTDSRYAFATAHVHGAIYKQRGWLTSAGKDIKNKEEILALLEAIHLPKRVAIIHCPGHQRGTDPVATGNRKADEAAKQAAQSTRILTETTKNAGKRTADGSEFEKRTADGSEFESPKKKAKVE

SEQ ID NO: 7288 - protein, 2096 aa, synthetic construct
MPAAKRVKLDGGDKKYSIGLDIGTNSVGWAVITDEYKVPSKKFKVLGNTDRHSIKKNLIGALLFDSGETAEATRLKRTARRRYTRRKNRICYLQEIFSNEMAKVDDSFFHRLEESFLVEEDKKHERHPIFGNIVDEVAYHEKYPTIYHLRKKLVDSTDKADLRLIYLALAHMIKFRGHFLIEGDLNPDNSDVDKLFIQLVQTYNQLFEENPINASGVDAKAILSARLSKSRRLENLIAQLPGEKKNGLFGNLIALSLGLTPNFKSNFDLAEDAKLQLSKDTYDDDLDNLLAQIGDQYADLFLAAKNLSDAILLSDILRVNTEITKAPLSASMIKRYDEHHQDLTLLKALVRQQLPEKYKEIFFDQSKNGYAGYIDGGASQEEFYKFIKPILEKMDGTEELLVKLNREDLLRKQRTFDNGSIPHQIHLGELHAILRRQEDFYPFLKDNREKIEKILTFRIPYYVGPLARGNSRFAWMTRKSEETITPWNFEEVVDKGASAQSFIERMTNFDKNLPNEKVLPKHSLLYEYFTVYNELTKVKYVTEGMRKPAFLSGEQKKAIVDLLFKTNRKVTVKQLKEDYFKKIECFDSVEISGVEDRFNASLGTYHDLLKIIKDKDFLDNEENEDILEDIVLTLTLFEDREMIEERLKTYAHLFDDKVMKQLKRRRYTGWGRLSRKLINGIRDKQSGKTILDFLKSDGFANRNFMQLIHDDSLTFKEDIQKAQVSGQGDSLHEHIANLAGSPAIKKGILQTVKVVDELVKVMGRHKPENIVIEMARENQTTQKGQKNSRERMKRIEEGIKELGSQILKEHPVENTQLQNEKLYLYYLQNGRDMYVDQELDINRLSDYDVDHIVPQSFLKDDSIDNKVLTRSDKARGKSDNVPSEEVVKKMKNYWRQLLNAKLITQRKFDNLTKAERGGLSELDKAGFIKRQLVETRQITKHVAQILDSRMNTKYDENDKLIREVKVITLKSKLVSDFRKDFQFYKVREINNYHHAHDAYLNAVVGTALIKKYPKLESEFVYGDYKVYDVRKMIAKSEQEIGKATAKYFFYSNIMNFFKTEITLANGEIRKRPLIETNGETGEIVWDKGRDFATVRKVLSMPQVNIVKKTEVQTGGFSKESILPKRNSDKLIARKKDWDPKKYGGFDSPTVAYSVLVVAKVEKGKSKKLKSVKELLGITIMERSSFEKNPIDFLEAKGYKEVKKDLIIKLPKYSLFELENGRKRMLASAGELQKGNELALPSKYVNFLYLASHYEKLKGSPEDNEQKQLFVEQHKHYLDEIIEQISEFSKRVILADANLDKVLSAYNKHRDKPIREQAENIIHLFTLTNLGAPAAFKYFDTTIDRKRYTSTKEVLDATLIHQSITGLYETRIDLSQLGGDGGGGGEAAAKGSSGGTLNLEDEYRLYETSAEPEVSPGSTWLSDFPQAWAETGGMGLAVRQAPLIIPLKATSTPVSIKQYPMSQEAKLGIKPHIQRLLDQGILVPCQSPWNTPLLPVKKPGTNDYRPVQDLREVNKRVEDIHPTVPNPYNLLSGLPPSHRWYTVLDLKDAFFCLRLHPTSQPLFAFEWRDPGMGISGQLTWTRLPQGFKNSPTLFNEALHRDLADFRIQHPDLILLQYVDDILLAATSELDCQQGTRALLLTLGNLGYRASAKKAQLCQKQVKYLGYLLKEGQRWLTEARKETVMGQPTPKTPRQLREFLGTAGFCRLWIPGFAEMAAPLYPLTKPGTLFNWGPDQQKAYQEIKQALLTAPALGLPDLTKPFELFVDEKQGYAKGVLTQKLGPWRRPVAYLSKKLDPVAAGWPPCLRMVAAIAVLRKDAGKLTMGQPLVILAPHAVEALVKQPPDRWLSNARMTHYQAMLLDTDRVQFGPVVALNPATLLPLPEEGAPHDCLEILAETHGTRPDLTDQPIPDADHTWYTDGSSFLQEGQRKAGAAVTTETEVIWARALPAGTSAQRAELIALTQALKMAEGKRLNVYTDSRYAFATAHIHGEIYRRRGWLTSEGREIKNKSEILALLKALFLPKRLSIIHCLGHQKGDSAEARGNRLADQAAREAAIKTPPDTSTLLAGKRTADGSEFEKRTADGSEFESPKKKAKVE

SEQ ID NO: 7289 - protein, 2096 aa, synthetic construct
MPAAKRVKLDGGDKKYSIGLDIGTNSVGWAVITDEYKVPSKKFKVLGNTDRHSIKKNLIGALLFDSGETAEATRLKRTARRRYTRRKNRICYLQEIFSNEMAKVDDSFFHRLEESFLVEEDKKHERHPIFGNIVDEVAYHEKYPTIYHLRKKLVDSTDKADLRLIYLALAHMIKFRGHFLIEGDLNPDNSDVDKLFIQLVQTYNQLFEENPINASGVDAKAILSARLSKSRRLENLIAQLPGEKKNGLFGNLIALSLGLTPNFKSNFDLAEDAKLQLSKDTYDDDLDNLLAQIGDQYADLFLAAKNLSDAILLSDILRVNTEITKAPLSASMIKRYDEHHQDLTLLKALVRQQLPEKYKEIFFDQSKNGYAGYIDGGASQEEFYKFIKPILEKMDGTEELLVKLNREDLLRKQRTFDNGSIPHQIHLGELHAILRRQEDFYPFLKDNREKIEKILTFRIPYYVGPLARGNSRFAWMTRKSEETITPWNFEEVVDKGASAQSFIERMTNFDKNLPNEKVLPKHSLLYEYFTVYNELTKVKYVTEGMRKPAFLSGEQKKAIVDLLFKTNRKVTVKQLKEDYFKKIECFDSVEISGVEDRFNASLGTYHDLLKIIKDKDFLDNEENEDILEDIVLTLTLFEDREMIEERLKTYAHLFDDKVMKQLKRRRYTGWGRLSRKLINGIRDKQSGKTILDFLKSDGFANRNFMQLIHDDSLTFKEDIQKAQVSGQGDSLHEHIANLAGSPAIKKGILQTVKVVDELVKVMGRHKPENIVIEMARENQTTQKGQKNSRERMKRIEEGIKELGSQILKEHPVENTQLQNEKLYLYYLQNGRDMYVDQELDINRLSDYDVDHIVPQSFLKDDSIDNKVLTRSDKARGKSDNVPSEEVVKKMKNYWRQLLNAKLITQRKFDNLTKAERGGLSELDKAGFIKRQLVETRQITKHVAQILDSRMNTKYDENDKLIREVKVITLKSKLVSDFRKDFQFYKVREINNYHHAHDAYLNAVVGTALIKKYPKLESEFVYGDYKVYDVRKMIAKSEQEIGKATAKYFFYSNIMNFFKTEITLANGEIRKRPLIETNGETGEIVWDKGRDFATVRKVLSMPQVNIVKKTEVQTGGFSKESILPKRNSDKLIARKKDWDPKKYGGFDSPTVAYSVLVVAKVEKGKSKKLKSVKELLGITIMERSSFEKNPIDFLEAKGYKEVKKDLIIKLPKYSLFELENGRKRMLASAGELQKGNELALPSKYVNFLYLASHYEKLKGSPEDNEQKQLFVEQHKHYLDEIIEQISEFSKRVILADANLDKVLSAYNKHRDKPIREQAENIIHLFTLTNLGAPAAFKYFDTTIDRKRYTSTKEVLDATLIHQSITGLYETRIDLSQLGGDGGGGGEAAAKGSSGGTLGIEDEYRLHETSTEPDVSLGSTWLSDFPQAWAETGGMGLAVRQAPLIIPLKATSTPVSIQQYPMSHEARLGIKPHIQRLLDQGILVPCQSPWNTPLLPVKKPGTNDYRPVQDLREVNKRVEDIHPTVPNPYNLLSGLPPSHQWYTVLDLKDAFFCLRLHPTSQPLFAFEWRDPGMGISGQLTWTRLPQGFKNSPTLFDEALHRDLADFRIQHPDLILLQYVDDILLAATSELDCQQGTRALLQTLGDLGYRASAKKAQICQKQVKYLGYLLREGQRWLTEARKETVMGQPVPKTPRQLREFLGTAGFCRLWIPGFAEMAAPLYPLTKTGTLFSWGPDQQKAYQEIKQALLTAPALGLPDLTKPFELFVDEKQGYAKGVLTQKLGPWRRPVAYLSKKLDPVAAGWPPCLRMVAAIAVLTKDAGKLTMGQPLVILAPHAVEALVKQPPDRWLSNARMTHYQAMLLDTDRVQFGPVVALNPATLLPLPEEGAPHDCLEILAETHGTRPDLTDQPIPDADHTWYTDGSSFLQEGQRKAGAAVTTETEVIWAGALPAGTSAQRAELIALTQALKMAEGKRLNVYTDSRYAFATAHIHGEIYRRRGLLTSEGREIKNKSEILALLKALFLPKRLSIIHCLGHQKGDSAEARGNRLADQAAREAAIKTPPDTSTLLAGKRTADGSEFEKRTADGSEFESPKKKAKVE

SEQ ID NO: 7290 - protein, 2096 aa, synthetic construct
MPAAKRVKLDGGDKKYSIGLDIGTNSVGWAVITDEYKVPSKKFKVLGNTDRHSIKKNLIGALLFDSGETAEATRLKRTARRRYTRRKNRICYLQEIFSNEMAKVDDSFFHRLEESFLVEEDKKHERHPIFGNIVDEVAYHEKYPTIYHLRKKLVDSTDKADLRLIYLALAHMIKFRGHFLIEGDLNPDNSDVDKLFIQLVQTYNQLFEENPINASGVDAKAILSARLSKSRRLENLIAQLPGEKKNGLFGNLIALSLGLTPNFKSNFDLAEDAKLQLSKDTYDDDLDNLLAQIGDQYADLFLAAKNLSDAILLSDILRVNTEITKAPLSASMIKRYDEHHQDLTLLKALVRQQLPEKYKEIFFDQSKNGYAGYIDGGASQEEFYKFIKPILEKMDGTEELLVKLNREDLLRKQRTFDNGSIPHQIHLGELHAILRRQEDFYPFLKDNREKIEKILTFRIPYYVGPLARGNSRFAWMTRKSEETITPWNFEEVVDKGASAQSFIERMTNFDKNLPNEKVLPKHSLLYEYFTVYNELTKVKYVTEGMRKPAFLSGEQKKAIVDLLFKTNRKVTVKQLKEDYFKKIECFDSVEISGVEDRFNASLGTYHDLLKIIKDKDFLDNEENEDILEDIVLTLTLFEDREMIEERLKTYAHLFDDKVMKQLKRRRYTGWGRLSRKLINGIRDKQSGKTILDFLKSDGFANRNFMQLIHDDSLTFKEDIQKAQVSGQGDSLHEHIANLAGSPAIKKGILQTVKVVDELVKVMGRHKPENIVIEMARENQTTQKGQKNSRERMKRIEEGIKELGSQILKEHPVENTQLQNEKLYLYYLQNGRDMYVDQELDINRLSDYDVDHIVPQSFLKDDSIDNKVLTRSDKARGKSDNVPSEEVVKKMKNYWRQLLNAKLITQRKFDNLTKAERGGLSELDKAGFIKRQLVETRQITKHVAQILDSRMNTKYDENDKLIREVKVITLKSKLVSDFRKDFQFYKVREINNYHHAHDAYLNAVVGTALIKKYPKLESEFVYGDYKVYDVRKMIAKSEQEIGKATAKYFFYSNIMNFFKTEITLANGEIRKRPLIETNGETGEIVWDKGRDFATVRKVLSMPQVNIVKKTEVQTGGFSKESILPKRNSDKLIARKKDWDPKKYGGFDSPTVAYSVLVVAKVEKGKSKKLKSVKELLGITIMERSSFEKNPIDFLEAKGYKEVKKDLIIKLPKYSLFELENGRKRMLASAGELQKGNELALPSKYVNFLYLASHYEKLKGSPEDNEQKQLFVEQHKHYLDEIIEQISEFSKRVILADANLDKVLSAYNKHRDKPIREQAENIIHLFTLTNLGAPAAFKYFDTTIDRKRYTSTKEVLDATLIHQSITGLYETRIDLSQLGGDGGGGGEAAAKGSSGGTLGIEDEYRLHETSTEPDVSLGSTWLSDFPQAWAETGGMGLAVRQAPLIIPLKATSTPVSIQQYPMSHEARLGIKPHIQRLLDQGILVPCQSPWNTPLLPVKKPGTNDYRPVQDLREVNKRVEDIHPTVPNPYNLLSGLPPSHQWYTVLDLKDAFFCLRLHPTSQPLFAFEWRDPGMGISGQLTWTRLPQGFKNSPTLFNEALHRDLADFRIQHPDLILLQYVDDILLAATSELDCQQGTRALLQTLGDLGYRASAKKAQICQKQVKYLGYLLREGQRWLTEARKETVMGQPVPKTPRQLREFLGTAGFCRLWIPGFAEMAAPLYPLTKPGTLFSWGPDQQKAYQEIKQALLTAPALGLPDLTKPFELFVDEKQGYAKGVLTQKLGPWRRPVAYLSKKLDPVAAGWPPCLRMVAAIAVLTKDAGKLTMGQPLVILAPHAVEALVKQPPDRWLSNARMTHYQAMLLDTDRVQFGPVVALNPATLLPLPEEGAPHDCLEILAETHGTRPDLTDQPIPDADHTWYTDGSSFLQEGQRKAGAAVTTETEVIWAGALPAGTSAQRAELIALTQALKMAEGKRLNVYTDSRYAFATAHIHGEIYRRRGWLTSEGREIKNKSEILALLKALFLPKRLSIIHCLGHQKGDSAEARGNRLADQAAREAAIKTPPDTSTLLAGKRTADGSEFEKRTADGSEFESPKKKAKVE

SEQ ID NO: 7291 - protein, 2096 aa, synthetic construct
MPAAKRVKLDGGDKKYSIGLDIGTNSVGWAVITDEYKVPSKKFKVLGNTDRHSIKKNLIGALLFDSGETAEATRLKRTARRRYTRRKNRICYLQEIFSNEMAKVDDSFFHRLEESFLVEEDKKHERHPIFGNIVDEVAYHEKYPTIYHLRKKLVDSTDKADLRLIYLALAHMIKFRGHFLIEGDLNPDNSDVDKLFIQLVQTYNQLFEENPINASGVDAKAILSARLSKSRRLENLIAQLPGEKKNGLFGNLIALSLGLTPNFKSNFDLAEDAKLQLSKDTYDDDLDNLLAQIGDQYADLFLAAKNLSDAILLSDILRVNTEITKAPLSASMIKRYDEHHQDLTLLKALVRQQLPEKYKEIFFDQSKNGYAGYIDGGASQEEFYKFIKPILEKMDGTEELLVKLNREDLLRKQRTFDNGSIPHQIHLGELHAILRRQEDFYPFLKDNREKIEKILTFRIPYYVGPLARGNSRFAWMTRKSEETITPWNFEEVVDKGASAQSFIERMTNFDKNLPNEKVLPKHSLLYEYFTVYNELTKVKYVTEGMRKPAFLSGEQKKAIVDLLFKTNRKVTVKQLKEDYFKKIECFDSVEISGVEDRFNASLGTYHDLLKIIKDKDFLDNEENEDILEDIVLTLTLFEDREMIEERLKTYAHLFDDKVMKQLKRRRYTGWGRLSRKLINGIRDKQSGKTILDFLKSDGFANRNFMQLIHDDSLTFKEDIQKAQVSGQGDSLHEHIANLAGSPAIKKGILQTVKVVDELVKVMGRHKPENIVIEMARENQTTQKGQKNSRERMKRIEEGIKELGSQILKEHPVENTQLQNEKLYLYYLQNGRDMYVDQELDINRLSDYDVDHIVPQSFLKDDSIDNKVLTRSDKARGKSDNVPSEEVVKKMKNYWRQLLNAKLITQRKFDNLTKAERGGLSELDKAGFIKRQLVETRQITKHVAQILDSRMNTKYDENDKLIREVKVITLKSKLVSDFRKDFQFYKVREINNYHHAHDAYLNAVVGTALIKKYPKLESEFVYGDYKVYDVRKMIAKSEQEIGKATAKYFFYSNIMNFFKTEITLANGEIRKRPLIETNGETGEIVWDKGRDFATVRKVLSMPQVNIVKKTEVQTGGFSKESILPKRNSDKLIARKKDWDPKKYGGFDSPTVAYSVLVVAKVEKGKSKKLKSVKELLGITIMERSSFEKNPIDFLEAKGYKEVKKDLIIKLPKYSLFELENGRKRMLASAGELQKGNELALPSKYVNFLYLASHYEKLKGSPEDNEQKQLFVEQHKHYLDEIIEQISEFSKRVILADANLDKVLSAYNKHRDKPIREQAENIIHLFTLTNLGAPAAFKYFDTTIDRKRYTSTKEVLDATLIHQSITGLYETRIDLSQLGGDGGGGGEAAAKGSSGGTLNIEDEYRLHETSKEPDVSLGSTWLSDFPQAWAETGGMGLAVRQAPLIIPLKATSTPVSIKQYPMSQEARLGIKPHIQRLLDQGILVPCQSPWNTPLLPVKKPGTNDYRPVQDLREVNKRVEDIHPTVPNPYNLLSGLPPSHQWYTVLDLKDAFFCLRLHPTSQPLFAFEWRDPEMGISGQLTWTRLPQGFKNSPTLFNEALHRDLAGFRIQHPDLILLQYVDDLLLAATSELDCQQGTRALLQTLGDLGYRASAKKAQICQKQVKYLGYLLKEGQRWLTEARKETVMGQPIPKTPRQLREFLGTAGFCRLWIPGFAEMAAPLYPLTKPGTLFNWGPDQQKAFQEIKQALLTAPALGLPDLTKPFELFVDEKQGYAKGVLTQKLGPWRRPVAYLSKKLDPVAAGWPPCLRMVAAIAVLTKDAGKLTMGQPLVILAPHAVEALVKQPPDRWLSNARMTHYQALLLDTDRVQFGPVVALNPATLLPLPEEGLQHDCLDILAEAHGTRSDLMDQPLPDADHTWYTDGSSFLQEGQRKAGAAVTTETEVIWARALPAGTSAQRAELIALTQALKMAEGKKLNVYTDSRYAFATAHIHGEIYRRRGWLTSEGKEIKNKDEILALLKALFLPKRLSIIHCPGHQKGNSAEARGNRMADQAAREVATRETPETSTLLAGKRTADGSEFEKRTADGSEFESPKKKAKVE

SEQ ID NO: 7292 - protein, 2096 aa, synthetic construct
MPAAKRVKLDGGDKKYSIGLDIGTNSVGWAVITDEYKVPSKKFKVLGNTDRHSIKKNLIGALLFDSGETAEATRLKRTARRRYTRRKNRICYLQEIFSNEMAKVDDSFFHRLEESFLVEEDKKHERHPIFGNIVDEVAYHEKYPTIYHLRKKLVDSTDKADLRLIYLALAHMIKFRGHFLIEGDLNPDNSDVDKLFIQLVQTYNQLFEENPINASGVDAKAILSARLSKSRRLENLIAQLPGEKKNGLFGNLIALSLGLTPNFKSNFDLAEDAKLQLSKDTYDDDLDNLLAQIGDQYADLFLAAKNLSDAILLSDILRVNTEITKAPLSASMIKRYDEHHQDLTLLKALVRQQLPEKYKEIFFDQSKNGYAGYIDGGASQEEFYKFIKPILEKMDGTEELLVKLNREDLLRKQRTFDNGSIPHQIHLGELHAILRRQEDFYPFLKDNREKIEKILTFRIPYYVGPLARGNSRFAWMTRKSEETITPWNFEEVVDKGASAQSFIERMTNFDKNLPNEKVLPKHSLLYEYFTVYNELTKVKYVTEGMRKPAFLSGEQKKAIVDLLFKTNRKVTVKQLKEDYFKKIECFDSVEISGVEDRFNASLGTYHDLLKIIKDKDFLDNEENEDILEDIVLTLTLFEDREMIEERLKTYAHLFDDKVMKQLKRRRYTGWGRLSRKLINGIRDKQSGKTILDFLKSDGFANRNFMQLIHDDSLTFKEDIQKAQVSGQGDSLHEHIANLAGSPAIKKGILQTVKVVDELVKVMGRHKPENIVIEMARENQTTQKGQKNSRERMKRIEEGIKELGSQILKEHPVENTQLQNEKLYLYYLQNGRDMYVDQELDINRLSDYDVDHIVPQSFLKDDSIDNKVLTRSDKARGKSDNVPSEEVVKKMKNYWRQLLNAKLITQRKFDNLTKAERGGLSELDKAGFIKRQLVETRQITKHVAQILDSRMNTKYDENDKLIREVKVITLKSKLVSDFRKDFQFYKVREINNYHHAHDAYLNAVVGTALIKKYPKLESEFVYGDYKVYDVRKMIAKSEQEIGKATAKYFFYSNIMNFFKTEITLANGEIRKRPLIETNGETGEIVWDKGRDFATVRKVLSMPQVNIVKKTEVQTGGFSKESILPKRNSDKLIARKKDWDPKKYGGFDSPTVAYSVLVVAKVEKGKSKKLKSVKELLGITIMERSSFEKNPIDFLEAKGYKEVKKDLIIKLPKYSLFELENGRKRMLASAGELQKGNELALPSKYVNFLYLASHYEKLKGSPEDNEQKQLFVEQHKHYLDEIIEQISEFSKRVILADANLDKVLSAYNKHRDKPIREQAENIIHLFTLTNLGAPAAFKYFDTTIDRKRYTSTKEVLDATLIHQSITGLYETRIDLSQLGGDGGGGGEAAAKGSSGGTLNIEDEYRLHETSKGPDVPLGSTWLSDFPQAWAETGGMGLAVRQAPLIIPLKATSTPVSIKQYPMSQEARLGIKPHIQRLLDQGILVPCQSPWNTPLLPVKKPGTNDYRPVQDLREVNKRVEDIHPTVPNPYNLLSGLPPSHQWYTVLDLKDAFFCLRLHPTSQSLFAFEWRDPEMGISGQLTWTRLPQGFKNSPTLFNEALHRDLADFRIQHPDLILLQYVDDLLLAATSELDCQQGTRALLQTLGDLGYRASAKKAQICQKQVKYLGYLLKEGQRWLTEARKETVMGQPTPKTPRQLREFLGTAGFCRLWIPGFAEMAAPLYPLTKPGTLFEWGPDQQKAYQEIKQALLTAPALGLPDLTKPFELFVDEKQGYAKGVLTQKLGPWRRPVAYLSKKLDPVAAGWPPCLRMVAAIAVLTKDAGKLTMGQPLVILAPHAVEALVKQPPDRWLSNARMTHYQALLLDTDRVQFGPIVALNPATLLPLPEEGLQHDCLDILAEAHGTRPDLTDQPLPDADHTWYTDGSSFLQEGQRKAGAAVTTETEVVWAKALPAGTSAQRAELIALTQALKMAEGKKLNVYTDSRYAFATAHIHGEIYRRRGWLTSEGKEIKNKDEILALLKALFLPKRLSIIHCPGHQKGNRAEARGNRMADQAAREVATRETPETSTLLAGKRTADGSEFEKRTADGSEFESPKKKAKVE

SEQ ID NO: 7293 - protein, 2096 aa, synthetic construct; identical to SEQ ID NO: 4530

SEQ ID NO: 7294 - protein, 2096 aa, synthetic construct
MPAAKRVKLDGGDKKYSIGLDIGTNSVGWAVITDEYKVPSKKFKVLGNTDRHSIKKNLIGALLFDSGETAEATRLKRTARRRYTRRKNRICYLQEIFSNEMAKVDDSFFHRLEESFLVEEDKKHERHPIFGNIVDEVAYHEKYPTIYHLRKKLVDSTDKADLRLIYLALAHMIKFRGHFLIEGDLNPDNSDVDKLFIQLVQTYNQLFEENPINASGVDAKAILSARLSKSRRLENLIAQLPGEKKNGLFGNLIALSLGLTPNFKSNFDLAEDAKLQLSKDTYDDDLDNLLAQIGDQYADLFLAAKNLSDAILLSDILRVNTEITKAPLSASMIKRYDEHHQDLTLLKALVRQQLPEKYKEIFFDQSKNGYAGYIDGGASQEEFYKFIKPILEKMDGTEELLVKLNREDLLRKQRTFDNGSIPHQIHLGELHAILRRQEDFYPFLKDNREKIEKILTFRIPYYVGPLARGNSRFAWMTRKSEETITPWNFEEVVDKGASAQSFIERMTNFDKNLPNEKVLPKHSLLYEYFTVYNELTKVKYVTEGMRKPAFLSGEQKKAIVDLLFKTNRKVTVKQLKEDYFKKIECFDSVEISGVEDRFNASLGTYHDLLKIIKDKDFLDNEENEDILEDIVLTLTLFEDREMIEERLKTYAHLFDDKVMKQLKRRRYTGWGRLSRKLINGIRDKQSGKTILDFLKSDGFANRNFMQLIHDDSLTFKEDIQKAQVSGQGDSLHEHIANLAGSPAIKKGILQTVKVVDELVKVMGRHKPENIVIEMARENQTTQKGQKNSRERMKRIEEGIKELGSQILKEHPVENTQLQNEKLYLYYLQNGRDMYVDQELDINRLSDYDVDHIVPQSFLKDDSIDNKVLTRSDKARGKSDNVPSEEVVKKMKNYWRQLLNAKLITQRKFDNLTKAERGGLSELDKAGFIKRQLVETRQITKHVAQILDSRMNTKYDENDKLIREVKVITLKSKLVSDFRKDFQFYKVREINNYHHAHDAYLNAVVGTALIKKYPKLESEFVYGDYKVYDVRKMIAKSEQEIGKATAKYFFYSNIMNFFKTEITLANGEIRKRPLIETNGETGEIVWDKGRDFATVRKVLSMPQVNIVKKTEVQTGGFSKESILPKRNSDKLIARKKDWDPKKYGGFDSPTVAYSVLVVAKVEKGKSKKLKSVKELLGITIMERSSFEKNPIDFLEAKGYKEVKKDLIIKLPKYSLFELENGRKRMLASAGELQKGNELALPSKYVNFLYLASHYEKLKGSPEDNEQKQLFVEQHKHYLDEIIEQISEFSKRVILADANLDKVLSAYNKHRDKPIREQAENIIHLFTLTNLGAPAAFKYFDTTIDRKRYTSTKEVLDATLIHQSITGLYETRIDLSQLGGDGGGGGEAAAKGSSGGTLNIEDEHRLHETSKEPDVSLGSTWLSDFPQAWAETGGMGLAVRQAPLIIPLKATSTPVSIKQYPMSQEARLGIKPHIQRLLDQGILVPCQSPWNTPLLPVKKPGTNDYRPVQDLREVNKRVEDIHPTVPNPYNLLSGLPPSHQWYTVLDLKDAFFCLRLHPTSQPLFAFEWRDPEMGISGQLTWTRLPQGFKNSPTLFDEALHRDLADFRIQHPDLILLQYVDDLLLAATSELDCQQGTRALLQTLGNLGYRASAKKAQICQKQVKYLGYLLKEGQRWLTEARKETVMGQPTPKTPRQLREFLGTAGFCRLWIPGFAEMAAPLYPLTKTGTLFNWGPDQQKAYQEIKQALLTAPALGLPDLTKPFELFVDEKQGYAKGVLTQKLGPWRRPVAYLSKKLDPVAAGWPPCLRMVAAIAVLTKDAGKLTMGQPLVILAPHAVEALVKQPPDRWLSNARMTHYQALLLDTDRVQFGPVVALNPATLLPLPEEGLQHNCLDILAEAHGTRPDLTDQPLPDADHTWYTDGSSLLQEGQRKAGAAVTTETEVIWAKALPAGTSAQRAELIALTQALKMAEGKKLNVYTDSRYAFATAHIHGEIYRRRGLLTSEGKEIKNKDEILALLKALFLPKRLSIIHCPGHQKGHSAEARGNRMADQAARKAAITETPDTSTLLAGKRTADGSEFEKRTADGSEFESPKKKAKVE

SEQ ID NO: 7295 - protein, 2096 aa, synthetic construct; identical to SEQ ID NO: 4530

SEQ ID NO: 7296 - protein, 2090 aa, synthetic construct
MPAAKRVKLDGGDKKYSIGLDIGTNSVGWAVITDEYKVPSKKFKVLGNTDRHSIKKNLIGALLFDSGETAEATRLKRTARRRYTRRKNRICYLQEIFSNEMAKVDDSFFHRLEESFLVEEDKKHERHPIFGNIVDEVAYHEKYPTIYHLRKKLVDSTDKADLRLIYLALAHMIKFRGHFLIEGDLNPDNSDVDKLFIQLVQTYNQLFEENPINASGVDAKAILSARLSKSRRLENLIAQLPGEKKNGLFGNLIALSLGLTPNFKSNFDLAEDAKLQLSKDTYDDDLDNLLAQIGDQYADLFLAAKNLSDAILLSDILRVNTEITKAPLSASMIKRYDEHHQDLTLLKALVRQQLPEKYKEIFFDQSKNGYAGYIDGGASQEEFYKFIKPILEKMDGTEELLVKLNREDLLRKQRTFDNGSIPHQIHLGELHAILRRQEDFYPFLKDNREKIEKILTFRIPYYVGPLARGNSRFAWMTRKSEETITPWNFEEVVDKGASAQSFIERMTNFDKNLPNEKVLPKHSLLYEYFTVYNELTKVKYVTEGMRKPAFLSGEQKKAIVDLLFKTNRKVTVKQLKEDYFKKIECFDSVEISGVEDRFNASLGTYHDLLKIIKDKDFLDNEENEDILEDIVLTLTLFEDREMIEERLKTYAHLFDDKVMKQLKRRRYTGWGRLSRKLINGIRDKQSGKTILDFLKSDGFANRNFMQLIHDDSLTFKEDIQKAQVSGQGDSLHEHIANLAGSPAIKKGILQTVKVVDELVKVMGRHKPENIVIEMARENQTTQKGQKNSRERMKRIEEGIKELGSQILKEHPVENTQLQNEKLYLYYLQNGRDMYVDQELDINRLSDYDVDHIVPQSFLKDDSIDNKVLTRSDKARGKSDNVPSEEVVKKMKNYWRQLLNAKLITQRKFDNLTKAERGGLSELDKAGFIKRQLVETRQITKHVAQILDSRMNTKYDENDKLIREVKVITLKSKLVSDFRKDFQFYKVREINNYHHAHDAYLNAVVGTALIKKYPKLESEFVYGDYKVYDVRKMIAKSEQEIGKATAKYFFYSNIMNFFKTEITLANGEIRKRPLIETNGETGEIVWDKGRDFATVRKVLSMPQVNIVKKTEVQTGGFSKESILPKRNSDKLIARKKDWDPKKYGGFDSPTVAYSVLVVAKVEKGKSKKLKSVKELLGITIMERSSFEKNPIDFLEAKGYKEVKKDLIIKLPKYSLFELENGRKRMLASAGELQKGNELALPSKYVNFLYLASHYEKLKGSPEDNEQKQLFVEQHKHYLDEIIEQISEFSKRVILADANLDKVLSAYNKHRDKPIREQAENIIHLFTLTNLGAPAAFKYFDTTIDRKRYTSTKEVLDATLIHQSITGLYETRIDLSQLGGDGGGGGEAAAKGSSGGTLQLDDEYRLYSPLVKPDQNIQFWLEQFPQAWAETAGMGLAKQVPPQVIQLKASATPVSVRQYPLSKEAQEGIRPHVQRLIQQGILVPVQSPWNTPLLPVRKPGTNDYRPVQDLREVNKRVQDIHPTVPNPYNLLCALPPQRSWYTVLDLKDAFFCLRLHPTSQPLFAFEWRDPGTGRTGQLTWTRLPQGFKNSPTIFDEALHRDLANFRIQHPQVTLLQYVDDLLLAGATKQDCLEGTKALLLELSDLGYRASAKKAQICRREVTYLGYSLRDGQRWLTEARKKTVVQIPAPTTAKQVREFLGTAGFCRLWIPGFATLAAPLYPLTKEKGEFSWAPEHQKAFDAIKKALLSAPALALPDVTKPFTLYVDERKGVARGVLTQTLGPWRRPVAYLSKKLDPVASGWPVCLKAIAAVAILVKDADKLTLGQNITVIAPHALENIVRQPPDRWMTNARMTHYQSLLLTERVTFAPPAALNPATLLPEETDEPVTHDCHQLLIEETGVRKDLTDIPLTGEVLTWFTDGSSYVVEGKRMAGAAVVDGTRTIWASSLPEGTSAQKAELMALTQALRLAEGKSINIYTDSRYAFATAHVHGAIYKQRGLLTSAGREIKNKEEILSLLEALHLPKRLAIIHCPGHQKAKDPISRGNQMADRVAKQAAQGVNLLAGKRTADGSEFEKRTADGSEFESPKKKAKVE

SEQ ID NO: 7297 - protein, 2176 aa, synthetic construct
MPAAKRVKLDGGDKKYSIGLDIGTNSVGWAVITDEYKVPSKKFKVLGNTDRHSIKKNLIGALLFDSGETAEATRLKRTARRRYTRRKNRICYLQEIFSNEMAKVDDSFFHRLEESFLVEEDKKHERHPIFGNIVDEVAYHEKYPTIYHLRKKLVDSTDKADLRLIYLALAHMIKFRGHFLIEGDLNPDNSDVDKLFIQLVQTYNQLFEENPINASGVDAKAILSARLSKSRRLENLIAQLPGEKKNGLFGNLIALSLGLTPNFKSNFDLAEDAKLQLSKDTYDDDLDNLLAQIGDQYADLFLAAKNLSDAILLSDILRVNTEITKAPLSASMIKRYDEHHQDLTLLKALVRQQLPEKYKEIFFDQSKNGYAGYIDGGASQEEFYKFIKPILEKMDGTEELLVKLNREDLLRKQRTFDNGSIPHQIHLGELHAILRRQEDFYPFLKDNREKIEKILTFRIPYYVGPLARGNSRFAWMTRKSEETITPWNFEEVVDKGASAQSFIERMTNFDKNLPNEKVLPKHSLLYEYFTVYNELTKVKYVTEGMRKPAFLSGEQKKAIVDLLFKTNRKVTVKQLKEDYFKKIECFDSVEISGVEDRFNASLGTYHDLLKIIKDKDFLDNEENEDILEDIVLTLTLFEDREMIEERLKTYAHLFDDKVMKQLKRRRYTGWGRLSRKLINGIRDKQSGKTILDFLKSDGFANRNFMQLIHDDSLTFKEDIQKAQVSGQGDSLHEHIANLAGSPAIKKGILQTVKVVDELVKVMGRHKPENIVIEMARENQTTQKGQKNSRERMKRIEEGIKELGSQILKEHPVENTQLQNEKLYLYYLQNGRDMYVDQELDINRLSDYDVDHIVPQSFLKDDSIDNKVLTRSDKARGKSDNVPSEEVVKKMKNYWRQLLNAKLITQRKFDNLTKAERGGLSELDKAGFIKRQLVETRQITKHVAQILDSRMNTKYDENDKLIREVKVITLKSKLVSDFRKDFQFYKVREINNYHHAHDAYLNAVVGTALIKKYPKLESEFVYGDYKVYDVRKMIAKSEQEIGKATAKYFFYSNIMNFFKTEITLANGEIRKRPLIETNGETGEIVWDKGRDFATVRKVLSMPQVNIVKKTEVQTGGFSKESILPKRNSDKLIARKKDWDPKKYGGFDSPTVAYSVLVVAKVEKGKSKKLKSVKELLGITIMERSSFEKNPIDFLEAKGYKEVKKDLIIKLPKYSLFELENGRKRMLASAGELQKGNELALPSKYVNFLYLASHYEKLKGSPEDNEQKQLFVEQHKHYLDEIIEQISEFSKRVILADANLDKVLSAYNKHRDKPIREQAENIIHLFTLTNLGAPAAFKYFDTTIDRKRYTSTKEVLDATLIHQSITGLYETRIDLSQLGGDGGGGGEAAAKGSSGGMNPLQLLQPLPAEVKGTKLLAHWNSGATITCIPESFLEDEQPIKQTLIKTIHGEKQQNVYYLTFKVKGRKVEAEVIASPYEYILLSPTDVPWLTQQPLQLTILVPLQEYQDRILNKTALPEEQKQQLKALFTKYDNLWQHWENQVGHRKIRPHNIATGDYPPRPQKQYPINPKAKPSIQIVIDDLLKQGVLTPQNSTMNTPVYPVPKPDGRWRMVLDYREVNKTIPLTAAQNQHSAGILATIVRQKYKTTLDLANGFWAHPITPDSYWLTAFTWQGKQYCWTRLPQGFLNSPALFTADAVDLLKEVPNVQVYVDDIYLSHDNPHEHIQQLEKVFQILLQAGYVVSLKKSEIGQRTVEFLGFNITKEGRGLTDTFKTKLLNVTPPKDLKQLQSILGLLNFARNFIPNFAELVQTLYNLIASSKGKYIEWTEDNTKQLNKVIEALNTASNLEERLPDQRLVIKVNTSPSAGYVRYYNESGKKPIMYLNYVFSKAELKFSMLEKLLTTMHKALIKAMDLAMGQEILVYSPIVSMTKIQKTPLPERKALPIRWITWMTYLEDPRIQFHYDKTLPELKHIPDVYTSSIPPLKHPSQYEGVFCTDGSAIKSPDPTKSNNAGMGIVHAIYNPEYKILNQWSIPLGHHTAQMAEIAAVEFACKKALKVPGPVLVITDSFYVAESANKELPYWKSNGFVNNKKEPLKHISKWKSIAECLSIKPDITIQHEKGHQPINTSIHTEGNALADKLATQGSYVVNAGKRTADGSEFEKRTADGSEFESPKKKAKVE

SEQ ID NO: 7298 - protein, 2096 aa, synthetic construct
MPAAKRVKLDGGDKKYSIGLDIGTNSVGWAVITDEYKVPSKKFKVLGNTDRHSIKKNLIGALLFDSGETAEATRLKRTARRRYTRRKNRICYLQEIFSNEMAKVDDSFFHRLEESFLVEEDKKHERHPIFGNIVDEVAYHEKYPTIYHLRKKLVDSTDKADLRLIYLALAHMIKFRGHFLIEGDLNPDNSDVDKLFIQLVQTYNQLFEENPINASGVDAKAILSARLSKSRRLENLIAQLPGEKKNGLFGNLIALSLGLTPNFKSNFDLAEDAKLQLSKDTYDDDLDNLLAQIGDQYADLFLAAKNLSDAILLSDILRVNTEITKAPLSASMIKRYDEHHQDLTLLKALVRQQLPEKYKEIFFDQSKNGYAGYIDGGASQEEFYKFIKPILEKMDGTEELLVKLNREDLLRKQRTFDNGSIPHQIHLGELHAILRRQEDFYPFLKDNREKIEKILTFRIPYYVGPLARGNSRFAWMTRKSEETITPWNFEEVVDKGASAQSFIERMTNFDKNLPNEKVLPKHSLLYEYFTVYNELTKVKYVTEGMRKPAFLSGEQKKAIVDLLFKTNRKVTVKQLKEDYFKKIECFDSVEISGVEDRFNASLGTYHDLLKIIKDKDFLDNEENEDILEDIVLTLTLFEDREMIEERLKTYAHLFDDKVMKQLKRRRYTGWGRLSRKLINGIRDKQSGKTILDFLKSDGFANRNFMQLIHDDSLTFKEDIQKAQVSGQGDSLHEHIANLAGSPAIKKGILQTVKVVDELVKVMGRHKPENIVIEMARENQTTQKGQKNSRERMKRIEEGIKELGSQILKEHPVENTQLQNEKLYLYYLQNGRDMYVDQELDINRLSDYDVDHIVPQSFLKDDSIDNKVLTRSDKARGKSDNVPSEEVVKKMKNYWRQLLNAKLITQRKFDNLTKAERGGLSELDKAGFIKRQLVETRQITKHVAQILDSRMNTKYDENDKLIREVKVITLKSKLVSDFRKDFQFYKVREINNYHHAHDAYLNAVVGTALIKKYPKLESEFVYGDYKVYDVRKMIAKSEQEIGKATAKYFFYSNIMNFFKTEITLANGEIRKRPLIETNGETGEIVWDKGRDFATVRKVLSMPQVNIVKKTEVQTGGFSKESILPKRNSDKLIARKKDWDPKKYGGFDSPTVAYSVLVVAKVEKGKSKKLKSVKELLGITIMERSSFEKNPIDFLEAKGYKEVKKDLIIKLPKYSLFELENGRKRMLASAGELQKGNELALPSKYVNFLYLASHYEKLKGSPEDNEQKQLFVEQHKHYLDEIIEQISEFSKRVILADANLDKVLSAYNKHRDKPIREQAENIIHLFTLTNLGAPAAFKYFDTTIDRKRYTSTKEVLDATLIHQSITGLYETRIDLSQLGGDGGGGGEAAAKGSSGGTLNIEDEYRLHETSKEPDVPLGSTWLSDFPQAWAETGGMGLAVRQAPLIIPLKATSTPVSIKQYPMSQEARLGIKPHIQRLLDQGILVPCQSPWNTPLLPVKKPGTNDYRPVQDLREVNKRVEDIHPTVPNPYNLLSGLPPSHQWYTVLDLKDAFFCLRLHPTSQPLFAFEWRDPEMGISGQLTWTRLPQGFKNSPTLFNEALHRDLADFRIQHPDLILLQYVDDLLLAATSEQDCQRGTRALLQTLGNLGYRASAKKAQICQKQVKYLGYLLKEGQRWLTEARKETVMGQPTPKTPRQLREFLGTAGFCRLWIPGFAEMAAPLYPLTKPGTLFNWGPDQQKAYQEIKQALLTAPALGLPDLTKPFELFVDEKQGYAKGVLTQKLGPWRRPVAYLSKKLDPVAAGWPPCLRMVAAIAVLTKDAGKLTMGQPLVILAPHAVEALVKQPPDRWLSNARMTHYQAMLLDTDRVQFGPVVALNPATLLPLPEKEAPHDCLEILAETHGTRPDLTDQPIPDADYTWYTDGSSFLQEGQRRAGAAVTTETEVIWARALPAGTSAQRAELIALTQALKMAEGKKLNVYTDSRYAFATAHVHGEIYRRRGWLTSEGREIKNKNEILALLKALFLPKRLSIIHCPGHQKGNSAEARGNRMADQAAREAAMKAVLETSTLLAGKRTADGSEFEKRTADGSEFESPKKKAKVE

SEQ ID NO: 7299 - protein, 2102 aa, synthetic construct
MPAAKRVKLDGGDKKYSIGLDIGTNSVGWAVITDEYKVPSKKFKVLGNTDRHSIKKNLIGALLFDSGETAEATRLKRTARRRYTRRKNRICYLQEIFSNEMAKVDDSFFHRLEESFLVEEDKKHERHPIFGNIVDEVAYHEKYPTIYHLRKKLVDSTDKADLRLIYLALAHMIKFRGHFLIEGDLNPDNSDVDKLFIQLVQTYNQLFEENPINASGVDAKAILSARLSKSRRLENLIAQLPGEKKNGLFGNLIALSLGLTPNFKSNFDLAEDAKLQLSKDTYDDDLDNLLAQIGDQYADLFLAAKNLSDAILLSDILRVNTEITKAPLSASMIKRYDEHHQDLTLLKALVRQQLPEKYKEIFFDQSKNGYAGYIDGGASQEEFYKFIKPILEKMDGTEELLVKLNREDLLRKQRTFDNGSIPHQIHLGELHAILRRQEDFYPFLKDNREKIEKILTFRIPYYVGPLARGNSRFAWMTRKSEETITPWNFEEVVDKGASAQSFIERMTNFDKNLPNEKVLPKHSLLYEYFTVYNELTKVKYVTEGMRKPAFLSGEQKKAIVDLLFKTNRKVTVKQLKEDYFKKIECFDSVEISGVEDRFNASLGTYHDLLKIIKDKDFLDNEENEDILEDIVLTLTLFEDREMIEERLKTYAHLFDDKVMKQLKRRRYTGWGRLSRKLINGIRDKQSGKTILDFLKSDGFANRNFMQLIHDDSLTFKEDIQKAQVSGQGDSLHEHIANLAGSPAIKKGILQTVKVVDELVKVMGRHKPENIVIEMARENQTTQKGQKNSRERMKRIEEGIKELGSQILKEHPVENTQLQNEKLYLYYLQNGRDMYVDQELDINRLSDYDVDHIVPQSFLKDDSIDNKVLTRSDKARGKSDNVPSEEVVKKMKNYWRQLLNAKLITQRKFDNLTKAERGGLSELDKAGFIKRQLVETRQITKHVAQILDSRMNTKYDENDKLIREVKVITLKSKLVSDFRKDFQFYKVREINNYHHAHDAYLNAVVGTALIKKYPKLESEFVYGDYKVYDVRKMIAKSEQEIGKATAKYFFYSNIMNFFKTEITLANGEIRKRPLIETNGETGEIVWDKGRDFATVRKVLSMPQVNIVKKTEVQTGGFSKESILPKRNSDKLIARKKDWDPKKYGGFDSPTVAYSVLVVAKVEKGKSKKLKSVKELLGITIMERSSFEKNPIDFLEAKGYKEVKKDLIIKLPKYSLFELENGRKRMLASAGELQKGNELALPSKYVNFLYLASHYEKLKGSPEDNEQKQLFVEQHKHYLDEIIEQISEFSKRVILADANLDKVLSAYNKHRDKPIREQAENIIHLFTLTNLGAPAAFKYFDTTIDRKRYTSTKEVLDATLIHQSITGLYETRIDLSQLGGDGGGSSGGGEAAAKGGTVSLQDEHRLFDIPVTTSLPDVWLQDFPQAWAETGGLGRAKCQAPIIIDLKPTAVPVSIKQYPMSLEAHMGIRQHIIKFLELGVLRPCRSPWNTPLLPVKKPGTQDYRPVQDLREINKRTVDIHPTVPNPYNLLSTLKPDYSWYTVLDLKDAFFCLPLAPQSQELFAFEWKDPERGISGQLTWTRLPQGFKNSPTLFNEALHRDLTDFRTQHPEVTLLQYVDDLLLAAPTKKACTQGTRHLLQELGEKGYRASAKKAQICQTKVTYLGYILSEGKRWLTPGRIETVARIPPPRNPREVREFLGTAGFCRLWIPGFAELAAPLYALTKPSTPFTWQTEHQLAFEALKKALLSAPALGLPDTSKPFTLFLDERQGIAKGVLTQKLGPWKRPVAYLSKKLDPVAAGWPPCLRIMAATAMLVKDSAKLTLGQPLTVITPHTLEAIVRQPPDRWITNARLTHYQALLLDTDRVQFGPPVTLNPATLLPVPENQPSPHDCRQVLAETHGTREDLKDQELPDADHTWYTDGSSYLDSGTRRAGAAVVDGHNTIWAQSLPPGTSAQKAELIALTKALELSKGKKANIYTDSRYAFATAHTHGSIYERRGWLTSEGKEIKNKAEIIALLKALFLPQEVAIIHCPGHQKGQDPVAVGNRQADRVARQAAMAEVLTLATEPDNTSHITAGKRTADGSEFEKRTADGSEFESPKKKAKVE

SEQ ID NO: 7300 - protein, 2218 aa, synthetic construct
MPAAKRVKLDGGDKKYSIGLDIGTNSVGWAVITDEYKVPSKKFKVLGNTDRHSIKKNLIGALLFDSGETAEATRLKRTARRRYTRRKNRICYLQEIFSNEMAKVDDSFFHRLEESFLVEEDKKHERHPIFGNIVDEVAYHEKYPTIYHLRKKLVDSTDKADLRLIYLALAHMIKFRGHFLIEGDLNPDNSDVDKLFIQLVQTYNQLFEENPINASGVDAKAILSARLSKSRRLENLIAQLPGEKKNGLFGNLIALSLGLTPNFKSNFDLAEDAKLQLSKDTYDDDLDNLLAQIGDQYADLFLAAKNLSDAILLSDILRVNTEITKAPLSASMIKRYDEHHQDLTLLKALVRQQLPEKYKEIFFDQSKNGYAGYIDGGASQEEFYKFIKPILEKMDGTEELLVKLNREDLLRKQRTFDNGSIPHQIHLGELHAILRRQEDFYPFLKDNREKIEKILTFRIPYYVGPLARGNSRFAWMTRKSEETITPWNFEEVVDKGASAQSFIERMTNFDKNLPNEKVLPKHSLLYEYFTVYNELTKVKYVTEGMRKPAFLSGEQKKAIVDLLFKTNRKVTVKQLKEDYFKKIECFDSVEISGVEDRFNASLGTYHDLLKIIKDKDFLDNEENEDILEDIVLTLTLFEDREMIEERLKTYAHLFDDKVMKQLKRRRYTGWGRLSRKLINGIRDKQSGKTILDFLKSDGFANRNFMQLIHDDSLTFKEDIQKAQVSGQGDSLHEHIANLAGSPAIKKGILQTVKVVDELVKVMGRHKPENIVIEMARENQTTQKGQKNSRERMKRIEEGIKELGSQILKEHPVENTQLQNEKLYLYYLQNGRDMYVDQELDINRLSDYDVDHIVPQSFLKDDSIDNKVLTRSDKARGKSDNVPSEEVVKKMKNYWRQLLNAKLITQRKFDNLTKAERGGLSELDKAGFIKRQLVETRQITKHVAQILDSRMNTKYDENDKLIREVKVITLKSKLVSDFRKDFQFYKVREINNYHHAHDAYLNAVVGTALIKKYPKLESEFVYGDYKVYDVRKMIAKSEQEIGKATAKYFFYSNIMNFFKTEITLANGEIRKRPLIETNGETGEIVWDKGRDFATVRKVLSMPQVNIVKKTEVQTGGFSKESILPKRNSDKLIARKKDWDPKKYGGFDSPTVAYSVLVVAKVEKGKSKKLKSVKELLGITIMERSSFEKNPIDFLEAKGYKEVKKDLIIKLPKYSLFELENGRKRMLASAGELQKGNELALPSKYVNFLYLASHYEKLKGSPEDNEQKQLFVEQHKHYLDEIIEQISEFSKRVILADANLDKVLSAYNKHRDKPIREQAENIIHLFTLTNLGAPAAFKYFDTTIDRKRYTSTKEVLDATLIHQSITGLYETRIDLSQLGGDGGGSSGGGEAAAKGGTLGDQGSRGSDPLPEPRVTLTVEGIPTEFLVNTGAEHSVLTKPMGKMGSKRTVVAGATGSKVYPWTTKRLLKIGQKQVTHSFLVIPECPAPLLGRDLLTKLKAQIQFSTEGPQVTWEDRPAMCLVLNLEEEYRLHEKPVPPSIDPSWLQLFPMVWAEKAGMGLANQVPPVVVELKSDASPVAVRQYPMSKEAREGIRPHIQRFLDLGILVPCQSPWNTPLLPVKKPGTNDYRPVQDLREVNKRVQDIHPTVPNPYNLLSSLPPSHTWYSVLDLKDAFFCLKLHPNSQPLFAFEWRDPEKGNTGQLTWTRLPQGFKNSPTLFDEALHRDLASFRALNPQVVMLQYVDDLLVAAPTYRDCKEGTRRLLQELSKLGYRVSAKKAQLCREEVTYLGYLLKGGKRWLTPARKATVMKIPTPTTPRQVREFLGTAGFCRLWIPGFASLAAPLYPLTREKVPFTWTEAHQEAFGRIKEALLSAPALALPDLTKPFALYVDEKEGVARGVLTQTLGPWRRPVAYLSKKLDPVASGWPTCLKAIAAVALLLKDADKLTLGQNVLVIAPHNLESIVRQPPDRWMTNARMTHYQSLLLNERVSFAPPAILNPATLLPVESDDTPIHICSEILAEETGTRPDLRDQPLPGVPAWYTDGSSFIMDGRRQAGAAIVDNKRTVWASNLPEGTSAQKAELIALTQALRLAEGKSINIYTDSRYAFATAHVHGAIYKQRGLLTSAGKDIKNKEEILALLEAIHLPKRVAIIHCPGHQRGTDPVATGNRKADEAAKQAAQSTRILTETTKNAGKRTADGSEFEKRTADGSEFESPKKKAKVE

SEQ ID NO: 7301 - protein, 2127 aa, synthetic construct
MPAAKRVKLDGGDKKYSIGLDIGTNSVGWAVITDEYKVPSKKFKVLGNTDRHSIKKNLIGALLFDSGETAEATRLKRTARRRYTRRKNRICYLQEIFSNEMAKVDDSFFHRLEESFLVEEDKKHERHPIFGNIVDEVAYHEKYPTIYHLRKKLVDSTDKADLRLIYLALAHMIKFRGHFLIEGDLNPDNSDVDKLFIQLVQTYNQLFEENPINASGVDAKAILSARLSKSRRLENLIAQLPGEKKNGLFGNLIALSLGLTPNFKSNFDLAEDAKLQLSKDTYDDDLDNLLAQIGDQYADLFLAAKNLSDAILLSDILRVNTEITKAPLSASMIKRYDEHHQDLTLLKALVRQQLPEKYKEIFFDQSKNGYAGYIDGGASQEEFYKFIKPILEKMDGTEELLVKLNREDLLRKQRTFDNGSIPHQIHLGELHAILRRQEDFYPFLKDNREKIEKILTFRIPYYVGPLARGNSRFAWMTRKSEETITPWNFEEVVDKGASAQSFIERMTNFDKNLPNEKVLPKHSLLYEYFTVYNELTKVKYVTEGMRKPAFLSGEQKKAIVDLLFKTNRKVTVKQLKEDYFKKIECFDSVEISGVEDRFNASLGTYHDLLKIIKDKDFLDNEENEDILEDIVLTLTLFEDREMIEERLKTYAHLFDDKVMKQLKRRRYTGWGRLSRKLINGIRDKQSGKTILDFLKSDGFANRNFMQLIHDDSLTFKEDIQKAQVSGQGDSLHEHIANLAGSPAIKKGILQTVKVVDELVKVMGRHKPENIVIEMARENQTTQKGQKNSRERMKRIEEGIKELGSQILKEHPVENTQLQNEKLYLYYLQNGRDMYVDQELDINRLSDYDVDHIVPQSFLKDDSIDNKVLTRSDKARGKSDNVPSEEVVKKMKNYWRQLLNAKLITQRKFDNLTKAERGGLSELDKAGFIKRQLVETRQITKHVAQILDSRMNTKYDENDKLIREVKVITLKSKLVSDFRKDFQFYKVREINNYHHAHDAYLNAVVGTALIKKYPKLESEFVYGDYKVYDVRKMIAKSEQEIGKATAKYFFYSNIMNFFKTEITLANGEIRKRPLIETNGETGEIVWDKGRDFATVRKVLSMPQVNIVKKTEVQTGGFSKESILPKRNSDKLIARKKDWDPKKYGGFDSPTVAYSVLVVAKVEKGKSKKLKSVKELLGITIMERSSFEKNPIDFLEAKGYKEVKKDLIIKLPKYSLFELENGRKRMLASAGELQKGNELALPSKYVNFLYLASHYEKLKGSPEDNEQKQLFVEQHKHYLDEIIEQISEFSKRVILADANLDKVLSAYNKHRDKPIREQAENIIHLFTLTNLGAPAAFKYFDTTIDRKRYTSTKEVLDATLIHQSITGLYETRIDLSQLGGDGGGSSGGGEAAAKGGLLGRDLLTKLKAQIQFSTEGPQVTWEDRPAMCLVLNLEEEYRLHEKPVPPSIDPSWLQLFPMVWAEKAGMGLANQVPPVVVELKSDASPVAVRQYPMSKEAREGIRPHIQRFLDLGILVPCQSPWNTPLLPVKKPGTNDYRPVQDLREVNKRVQDIHPTVPNPYNLLSSLPPSHTWYSVLDLKDAFFCLKLHPNSQPLFAFEWRDPEKGNTGQLTWTRLPQGFKNSPTLFNEALHRDLASFRALNPQVVMLQYVDDLLVAAPTYRDCKEGTRRLLQELSKLGYRVSAKKAQLCREEVTYLGYLLKGGKRWLTPARKATVMKIPTPTTPRQVREFLGTAGFCRLWIPGFASLAAPLYPLTRPKVPFTWTEAHQEAFGRIKEALLSAPALALPDLTKPFALYVDEKEGVARGVLTQTLGPWRRPVAYLSKKLDPVASGWPTCLKAIAAVALLLKDADKLTLGQNVLVIAPHNLESIVRQPPDRWMTNARMTHYQSLLLNERVSFAPPAILNPATLLPVESDDTPIHICSEILAEETGTRPDLRDQPLPGVPAWYTDGSSFIMDGRRQAGAAIVDNKRTVWASNLPEGTSAQKAELIALTQALRLAEGKSINIYTDSRYAFATAHVHGAIYKQRGWLTSAGKDIKNKEEILALLEAIHLPKRVAIIHCPGHQRGTDPVATGNRKADEAAKQAAQSTRILTETTKNAGKRTADGSEFEKRTADGSEFESPKKKAKVE

SEQ ID NO: 7302 - protein, 2096 aa, synthetic construct
MPAAKRVKLDGGDKKYSIGLDIGTNSVGWAVITDEYKVPSKKFKVLGNTDRHSIKKNLIGALLFDSGETAEATRLKRTARRRYTRRKNRICYLQEIFSNEMAKVDDSFFHRLEESFLVEEDKKHERHPIFGNIVDEVAYHEKYPTIYHLRKKLVDSTDKADLRLIYLALAHMIKFRGHFLIEGDLNPDNSDVDKLFIQLVQTYNQLFEENPINASGVDAKAILSARLSKSRRLENLIAQLPGEKKNGLFGNLIALSLGLTPNFKSNFDLAEDAKLQLSKDTYDDDLDNLLAQIGDQYADLFLAAKNLSDAILLSDILRVNTEITKAPLSASMIKRYDEHHQDLTLLKALVRQQLPEKYKEIFFDQSKNGYAGYIDGGASQEEFYKFIKPILEKMDGTEELLVKLNREDLLRKQRTFDNGSIPHQIHLGELHAILRRQEDFYPFLKDNREKIEKILTFRIPYYVGPLARGNSRFAWMTRKSEETITPWNFEEVVDKGASAQSFIERMTNFDKNLPNEKVLPKHSLLYEYFTVYNELTKVKYVTEGMRKPAFLSGEQKKAIVDLLFKTNRKVTVKQLKEDYFKKIECFDSVEISGVEDRFNASLGTYHDLLKIIKDKDFLDNEENEDILEDIVLTLTLFEDREMIEERLKTYAHLFDDKVMKQLKRRRYTGWGRLSRKLINGIRDKQSGKTILDFLKSDGFANRNFMQLIHDDSLTFKEDIQKAQVSGQGDSLHEHIANLAGSPAIKKGILQTVKVVDELVKVMGRHKPENIVIEMARENQTTQKGQKNSRERMKRIEEGIKELGSQILKEHPVENTQLQNEKLYLYYLQNGRDMYVDQELDINRLSDYDVDHIVPQSFLKDDSIDNKVLTRSDKARGKSDNVPSEEVVKKMKNYWRQLLNAKLITQRKFDNLTKAERGGLSELDKAGFIKRQLVETRQITKHVAQILDSRMNTKYDENDKLIREVKVITLKSKLVSDFRKDFQFYKVREINNYHHAHDAYLNAVVGTALIKKYPKLESEFVYGDYKVYDVRKMIAKSEQEIGKATAKYFFYSNIMNFFKTEITLANGEIRKRPLIETNGETGEIVWDKGRDFATVRKVLSMPQVNIVKKTEVQTGGFSKESILPKRNSDKLIARKKDWDPKKYGGFDSPTVAYSVLVVAKVEKGKSKKLKSVKELLGITIMERSSFEKNPIDFLEAKGYKEVKKDLIIKLPKYSLFELENGRKRMLASAGELQKGNELALPSKYVNFLYLASHYEKLKGSPEDNEQKQLFVEQHKHYLDEIIEQISEFSKRVILADANLDKVLSAYNKHRDKPIREQAENIIHLFTLTNLGAPAAFKYFDTTIDRKRYTSTKEVLDATLIHQSITGLYETRIDLSQLGGDGGGSSGGGEAAAKGGTLNIEDEYRLHETSKGPDVPLGSTWLSDFPQAWAETGGMGLAVRQAPLIIPLKATSTPVSIKQYPMSQEARLGIKPHIQRLLDQGILVPCQSPWNTPLLPVKKPGTNDYRPVQDLREVNKRVEDIHPTVPNPYNLLSGLPPSHQWYTVLDLKDAFFCLRLHPTSQSLFAFEWRDPEMGISGQLTWTRLPQGFKNSPTLFNEALHRDLADFRIQHPDLILLQYVDDLLLAATSELDCQQGTRALLQTLGDLGYRASAKKAQICQKQVKYLGYLLKEGQRWLTEARKETVMGQPTPKTPRQLREFLGTAGFCRLWIPGFAEMAAPLYPLTKPGTLFEWGPDQQKAYQEIKQALLTAPALGLPDLTKPFELFVDEKQGYAKGVLTQKLGPWRRPVAYLSKKLDPVAAGWPPCLRMVAAIAVLTKDAGKLTMGQPLVILAPHAVEALVKQPPDRWLSNARMTHYQALLLDTDRVQFGPIVALNPATLLPLPEEGLQHDCLDILAEAHGTRPDLTDQPLPDADHTWYTDGSSFLQEGQRKAGAAVTTETEVVWAKALPAGTSAQRAELIALTQALKMAEGKKLNVYTDSRYAFATAHIHGEIYRRRGWLTSEGKEIKNKDEILALLKALFLPKRLSIIHCPGHQKGNRAEARGNRMADQAAREVATRETPETSTLLAGKRTADGSEFEKRTADGSEFESPKKKAKVE

SEQ ID NO: 7303 - protein, 2090 aa, synthetic construct
MPAAKRVKLDGGDKKYSIGLDIGTNSVGWAVITDEYKVPSKKFKVLGNTDRHSIKKNLIGALLFDSGETAEATRLKRTARRRYTRRKNRICYLQEIFSNEMAKVDDSFFHRLEESFLVEEDKKHERHPIFGNIVDEVAYHEKYPTIYHLRKKLVDSTDKADLRLIYLALAHMIKFRGHFLIEGDLNPDNSDVDKLFIQLVQTYNQLFEENPINASGVDAKAILSARLSKSRRLENLIAQLPGEKKNGLFGNLIALSLGLTPNFKSNFDLAEDAKLQLSKDTYDDDLDNLLAQIGDQYADLFLAAKNLSDAILLSDILRVNTEITKAPLSASMIKRYDEHHQDLTLLKALVRQQLPEKYKEIFFDQSKNGYAGYIDGGASQEEFYKFIKPILEKMDGTEELLVKLNREDLLRKQRTFDNGSIPHQIHLGELHAILRRQEDFYPFLKDNREKIEKILTFRIPYYVGPLARGNSRFAWMTRKSEETITPWNFEEVVDKGASAQSFIERMTNFDKNLPNEKVLPKHSLLYEYFTVYNELTKVKYVTEGMRKPAFLSGEQKKAIVDLLFKTNRKVTVKQLKEDYFKKIECFDSVEISGVEDRFNASLGTYHDLLKIIKDKDFLDNEENEDILEDIVLTLTLFEDREMIEERLKTYAHLFDDKVMKQLKRRRYTGWGRLSRKLINGIRDKQSGKTILDFLKSDGFANRNFMQLIHDDSLTFKEDIQKAQVSGQGDSLHEHIANLAGSPAIKKGILQTVKVVDELVKVMGRHKPENIVIEMARENQTTQKGQKNSRERMKRIEEGIKELGSQILKEHPVENTQLQNEKLYLYYLQNGRDMYVDQELDINRLSDYDVDHIVPQSFLKDDSIDNKVLTRSDKARGKSDNVPSEEVVKKMKNYWRQLLNAKLITQRKFDNLTKAERGGLSELDKAGFIKRQLVETRQITKHVAQILDSRMNTKYDENDKLIREVKVITLKSKLVSDFRKDFQFYKVREINNYHHAHDAYLNAVVGTALIKKYPKLESEFVYGDYKVYDVRKMIAKSEQEIGKATAKYFFYSNIMNFFKTEITLANGEIRKRPLIETNGETGEIVWDKGRDFATVRKVLSMPQVNIVKKTEVQTGGFSKESILPKRNSDKLIARKKDWDPKKYGGFDSPTVAYSVLVVAKVEKGKSKKLKSVKELLGITIMERSSFEKNPIDFLEAKGYKEVKKDLIIKLPKYSLFELENGRKRMLASAGELQKGNELALPSKYVNFLYLASHYEKLKGSPEDNEQKQLFVEQHKHYLDEIIEQISEFSKRVILADANLDKVLSAYNKHRDKPIREQAENIIHLFTLTNLGAPAAFKYFDTTIDRKRYTSTKEVLDATLIHQSITGLYETRIDLSQLGGDGGGSSGGGEAAAKGGTLQLDDEYRLYSPLVKPDQNIQFWLEQFPQAWAETAGMGLAKQVPPQVIQLKASATPVSVRQYPLSKEAQEGIRPHVQRLIQQGILVPVQSPWNTPLLPVRKPGTNDYRPVQDLREVNKRVQDIHPTVPNPYNLLCALPPQRSWYTVLDLKDAFFCLRLHPTSQPLFAFEWRDPGTGRTGQLTWTRLPQGFKNSPTIFDEALHRDLANFRIQHPQVTLLQYVDDLLLAGATKQDCLEGTKALLLELSDLGYRASAKKAQICRREVTYLGYSLRDGQRWLTEARKKTVVQIPAPTTAKQVREFLGTAGFCRLWIPGFATLAAPLYPLTKEKGEFSWAPEHQKAFDAIKKALLSAPALALPDVTKPFTLYVDERKGVARGVLTQTLGPWRRPVAYLSKKLDPVASGWPVCLKAIAAVAILVKDADKLTLGQNITVIAPHALENIVRQPPDRWMTNARMTHYQSLLLTERVTFAPPAALNPATLLPEETDEPVTHDCHQLLIEETGVRKDLTDIPLTGEVLTWFTDGSSYVVEGKRMAGAAVVDGTRTIWASSLPEGTSAQKAELMALTQALRLAEGKSINIYTDSRYAFATAHVHGAIYKQRGLLTSAGREIKNKEEILSLLEALHLPKRLAIIHCPGHQKAKDPISRGNQMADRVAKQAAQGVNLLAGKRTADGSEFEKRTADGSEFESPKKKAKVE

SEQ ID NO: 7304 - protein, 2087 aa, synthetic construct
MPAAKRVKLDGGDKKYSIGLDIGTNSVGWAVITDEYKVPSKKFKVLGNTDRHSIKKNLIGALLFDSGETAEATRLKRTARRRYTRRKNRICYLQEIFSNEMAKVDDSFFHRLEESFLVEEDKKHERHPIFGNIVDEVAYHEKYPTIYHLRKKLVDSTDKADLRLIYLALAHMIKFRGHFLIEGDLNPDNSDVDKLFIQLVQTYNQLFEENPINASGVDAKAILSARLSKSRRLENLIAQLPGEKKNGLFGNLIALSLGLTPNFKSNFDLAEDAKLQLSKDTYDDDLDNLLAQIGDQYADLFLAAKNLSDAILLSDILRVNTEITKAPLSASMIKRYDEHHQDLTLLKALVRQQLPEKYKEIFFDQSKNGYAGYIDGGASQEEFYKFIKPILEKMDGTEELLVKLNREDLLRKQRTFDNGSIPHQIHLGELHAILRRQEDFYPFLKDNREKIEKILTFRIPYYVGPLARGNSRFAWMTRKSEETITPWNFEEVVDKGASAQSFIERMTNFDKNLPNEKVLPKHSLLYEYFTVYNELTKVKYVTEGMRKPAFLSGEQKKAIVDLLFKTNRKVTVKQLKEDYFKKIECFDSVEISGVEDRFNASLGTYHDLLKIIKDKDFLDNEENEDILEDIVLTLTLFEDREMIEERLKTYAHLFDDKVMKQLKRRRYTGWGRLSRKLINGIRDKQSGKTILDFLKSDGFANRNFMQLIHDDSLTFKEDIQKAQVSGQGDSLHEHIANLAGSPAIKKGILQTVKVVDELVKVMGRHKPENIVIEMARENQTTQKGQKNSRERMKRIEEGIKELGSQILKEHPVENTQLQNEKLYLYYLQNGRDMYVDQELDINRLSDYDVDHIVPQSFLKDDSIDNKVLTRSDKARGKSDNVPSEEVVKKMKNYWRQLLNAKLITQRKFDNLTKAERGGLSELDKAGFIKRQLVETRQITKHVAQILDSRMNTKYDENDKLIREVKVITLKSKLVSDFRKDFQFYKVREINNYHHAHDAYLNAVVGTALIKKYPKLESEFVYGDYKVYDVRKMIAKSEQEIGKATAKYFFYSNIMNFFKTEITLANGEIRKRPLIETNGETGEIVWDKGRDFATVRKVLSMPQVNIVKKTEVQTGGFSKESILPKRNSDKLIARKKDWDPKKYGGFDSPTVAYSVLVVAKVEKGKSKKLKSVKELLGITIMERSSFEKNPIDFLEAKGYKEVKKDLIIKLPKYSLFELENGRKRMLASAGELQKGNELALPSKYVNFLYLASHYEKLKGSPEDNEQKQLFVEQHKHYLDEIIEQISEFSKRVILADANLDKVLSAYNKHRDKPIREQAENIIHLFTLTNLGAPAAFKYFDTTIDRKRYTSTKEVLDATLIHQSITGLYETRIDLSQLGGDGGGSSGGGEAAAKGGIPWLMKKPLQLTTLVPLQEYEERLLKQTMLTGSYKEKLQSLFLKYDALWQHWENQVGHRRIKPHHIATGTVNPRPQKQYPINPKAKASIQTVINDLLKQGVLIQQNSIMNTPVYPVPKPDGKWRMVLDYREVNKTIPLIAAQNQHSAGILSSIFRGKYKTTLDLSNGFWAHSITPESYWLTAFTWLGQQYCWTRLPQGFLNSPALFNADVVDLLKEVPNVQVYVDDIYISHDDPREHLEQLEKVFSLLLNAGYVVSLKKSEIAQHEVEFLGFNITKEGRGLTETFKQKLLNITPPRDLKQLQSILGKLNFARNFIPNFSELVKPLYNIIATAPGKYITWTTDNSQQLQNIISMLNSAENLEERNPEVRLIMKVNTSPSAGYIRFYNEFAKRPIMYLNYVYTKAEVKFTNTEKLLTTIHKGLIKALDLGMGQEILVYSPIVSMTKIQKTPLPERKALPIRWITWMSYLEDPRIQFHYDKTLPELQQVPTVTDDIIAKIKHPSEFSMVFYTDGSAIKHPNVNKSHNAGMGIAQVQFKPEFTVINTWSIPLGDHTAQLAEVAAVEFACKKALKIDGPVLIVTDSFYVAESVNKELPYWQSNGFFNNKKKPLKHVSKWKSIADCIQLKPDIIIIHEKGHQPTASTFHTEGNNLADKLATQGSYVVNAGKRTADGSEFEKRTADGSEFESPKKKAKVE

SEQ ID NO: 7305 - protein, 2176 aa, synthetic construct
MPAAKRVKLDGGDKKYSIGLDIGTNSVGWAVITDEYKVPSKKFKVLGNTDRHSIKKNLIGALLFDSGETAEATRLKRTARRRYTRRKNRICYLQEIFSNEMAKVDDSFFHRLEESFLVEEDKKHERHPIFGNIVDEVAYHEKYPTIYHLRKKLVDSTDKADLRLIYLALAHMIKFRGHFLIEGDLNPDNSDVDKLFIQLVQTYNQLFEENPINASGVDAKAILSARLSKSRRLENLIAQLPGEKKNGLFGNLIALSLGLTPNFKSNFDLAEDAKLQLSKDTYDDDLDNLLAQIGDQYADLFLAAKNLSDAILLSDILRVNTEITKAPLSASMIKRYDEHHQDLTLLKALVRQQLPEKYKEIFFDQSKNGYAGYIDGGASQEEFYKFIKPILEKMDGTEELLVKLNREDLLRKQRTFDNGSIPHQIHLGELHAILRRQEDFYPFLKDNREKIEKILTFRIPYYVGPLARGNSRFAWMTRKSEETITPWNFEEVVDKGASAQSFIERMTNFDKNLPNEKVLPKHSLLYEYFTVYNELTKVKYVTEGMRKPAFLSGEQKKAIVDLLFKTNRKVTVKQLKEDYFKKIECFDSVEISGVEDRFNASLGTYHDLLKIIKDKDFLDNEENEDILEDIVLTLTLFEDREMIEERLKTYAHLFDDKVMKQLKRRRYTGWGRLSRKLINGIRDKQSGKTILDFLKSDGFANRNFMQLIHDDSLTFKEDIQKAQVSGQGDSLHEHIANLAGSPAIKKGILQTVKVVDELVKVMGRHKPENIVIEMARENQTTQKGQKNSRERMKRIEEGIKELGSQILKEHPVENTQLQNEKLYLYYLQNGRDMYVDQELDINRLSDYDVDHIVPQSFLKDDSIDNKVLTRSDKARGKSDNVPSEEVVKKMKNYWRQLLNAKLITQRKFDNLTKAERGGLSELDKAGFIKRQLVETRQITKHVAQILDSRMNTKYDENDKLIREVKVITLKSKLVSDFRKDFQFYKVREINNYHHAHDAYLNAVVGTALIKKYPKLESEFVYGDYKVYDVRKMIAKSEQEIGKATAKYFFYSNIMNFFKTEITLANGEIRKRPLIETNGETGEIVWDKGRDFATVRKVLSMPQVNIVKKTEVQTGGFSKESILPKRNSDKLIARKKDWDPKKYGGFDSPTVAYSVLVVAKVEKGKSKKLKSVKELLGITIMERSSFEKNPIDFLEAKGYKEVKKDLIIKLPKYSLFELENGRKRMLASAGELQKGNELALPSKYVNFLYLASHYEKLKGSPEDNEQKQLFVEQHKHYLDEIIEQISEFSKRVILADANLDKVLSAYNKHRDKPIREQAENIIHLFTLTNLGAPAAFKYFDTTIDRKRYTSTKEVLDATLIHQSITGLYETRIDLSQLGGDGGGSSGGGEAAAKGGMDPLQLLQPLEAEIKGTKLKAHWNSGATITCVPQAFLEEEVPIKNIWIKTIHGEKEQPVYYLTFKIQGRKVEAEVISSPYDYILVSPSDIPWLMKKPLQLTTLVPLQEYEERLLKQTMLTGSYKEKLQSLFLKYDALWQHWENQVGHRRIKPHHIATGTVNPRPQKQYPINPKAKASIQTVINDLLKQGVLIQQNSIMNTPVYPVPKPDGKWRMVLDYREVNKTIPLIAAQNQHSAGILSSIFRGKYKTTLDLSNGFWAHSITPESYWLTAFTWLGQQYCWTRLPQGFLNSPALFNADVVDLLKEVPNVQVYVDDIYISHDDPREHLEQLEKVFSLLLNAGYVVSLKKSEIAQHEVEFLGFNITKEGRGLTETFKQKLLNITPPRDLKQLQSILGLLNFARNFIPNFSELVKPLYNIIATAPGKYITWTTDNSQQLQNIISMLNSAENLEERNPEVRLIMKVNTSPSAGYIRFYNEFAKRPIMYLNYVYTKAEVKFTNTEKLLTTIHKGLIKALDLGMGQEILVYSPIVSMTKIQKTPLPERKALPIRWITWMSYLEDPRIQFHYDKTLPELQQVPTVTDDIIAKIKHPSEFSMVFYTDGSAIKHPNVNKSHNAGMGIAQVQFKPEFTVINTWSIPLGDHTAQLAEVAAVEFACKKALKIDGPVLIVTDSFYVAESVNKELPYWQSNGFFNNKKKPLKHVSKWKSIADCIQLKPDIIIIHEKGHQPTASTFHTEGNNLADKLATQGSYVVNAGKRTADGSEFEKRTADGSEFESPKKKAKVE

SEQ ID NO: 7306 - protein, 2094 aa, synthetic construct
MPAAKRVKLDGGDKKYSIGLDIGTNSVGWAVITDEYKVPSKKFKVLGNTDRHSIKKNLIGALLFDSGETAEATRLKRTARRRYTRRKNRICYLQEIFSNEMAKVDDSFFHRLEESFLVEEDKKHERHPIFGNIVDEVAYHEKYPTIYHLRKKLVDSTDKADLRLIYLALAHMIKFRGHFLIEGDLNPDNSDVDKLFIQLVQTYNQLFEENPINASGVDAKAILSARLSKSRRLENLIAQLPGEKKNGLFGNLIALSLGLTPNFKSNFDLAEDAKLQLSKDTYDDDLDNLLAQIGDQYADLFLAAKNLSDAILLSDILRVNTEITKAPLSASMIKRYDEHHQDLTLLKALVRQQLPEKYKEIFFDQSKNGYAGYIDGGASQEEFYKFIKPILEKMDGTEELLVKLNREDLLRKQRTFDNGSIPHQIHLGELHAILRRQEDFYPFLKDNREKIEKILTFRIPYYVGPLARGNSRFAWMTRKSEETITPWNFEEVVDKGASAQSFIERMTNFDKNLPNEKVLPKHSLLYEYFTVYNELTKVKYVTEGMRKPAFLSGEQKKAIVDLLFKTNRKVTVKQLKEDYFKKIECFDSVEISGVEDRFNASLGTYHDLLKIIKDKDFLDNEENEDILEDIVLTLTLFEDREMIEERLKTYAHLFDDKVMKQLKRRRYTGWGRLSRKLINGIRDKQSGKTILDFLKSDGFANRNFMQLIHDDSLTFKEDIQKAQVSGQGDSLHEHIANLAGSPAIKKGILQTVKVVDELVKVMGRHKPENIVIEMARENQTTQKGQKNSRERMKRIEEGIKELGSQILKEHPVENTQLQNEKLYLYYLQNGRDMYVDQELDINRLSDYDVDHIVPQSFLKDDSIDNKVLTRSDKARGKSDNVPSEEVVKKMKNYWRQLLNAKLITQRKFDNLTKAERGGLSELDKAGFIKRQLVETRQITKHVAQILDSRMNTKYDENDKLIREVKVITLKSKLVSDFRKDFQFYKVREINNYHHAHDAYLNAVVGTALIKKYPKLESEFVYGDYKVYDVRKMIAKSEQEIGKATAKYFFYSNIMNFFKTEITLANGEIRKRPLIETNGETGEIVWDKGRDFATVRKVLSMPQVNIVKKTEVQTGGFSKESILPKRNSDKLIARKKDWDPKKYGGFDSPTVAYSVLVVAKVEKGKSKKLKSVKELLGITIMERSSFEKNPIDFLEAKGYKEVKKDLIIKLPKYSLFELENGRKRMLASAGELQKGNELALPSKYVNFLYLASHYEKLKGSPEDNEQKQLFVEQHKHYLDEIIEQISEFSKRVILADANLDKVLSAYNKHRDKPIREQAENIIHLFTLTNLGAPAAFKYFDTTIDRKRYTSTKEVLDATLIHQSITGLYETRIDLSQLGGDGGGSSGGGEAAAKGGVLNLEEEYRLHEKPVPSSIDPSWLQLFPTVWAERAGMGLANQVPPVVVELRSGASPVAVRQYPMSKEAREGIRPHIQRFLDLGVLVPCQSPWNTPLLPVKKPGTNDYRPVQDLREINKRVQDIHPTVPNPYNLLSSLPPSHTWYSVLDLKDAFFCLKLHPNSQPLFAFEWRDPEKGNTGQLTWTRLPQGFKNSPTLFNEALHRDLAPFRALNPQVVLLQYVDDLLVAAPTYRDCKEGTQKLLQELSKLGYRVSAKKAQLCQKEVTYLGYLLKEGKRWLTPARKATVMKIPPPTTPRQVREFLGTAGFCRLWIPGFASLAAPLYPLTKPSIPFIWTEEHQKAFDRIKEALLSAPALALPDLTKPFTLYVDERAGVARGVLTQTLGPWRRPVAYLSKKLDPVASGWPTCLKAVAAVALLLKDADKLTLGQNVTVIASHSLESIVRQPPDRWMTNARMTHYQSLLLNERVSFAPPAVLNPATLLPVESEATPVHRCSEILAEETGTRRDLKDQPLPGVPAWYTDGSSFIAEGKRRAGAAIVDGKRTVWASSLPEGTSAQKAELVALTQALRLAEGKDINIYTDSRYAFATAHIHGAIYKQRGWLTSAGKDIKNKEEILALLEAIHLPKRVAIIHCPGHQKGNDPVATGNRRADEAAKQAALSTRVLAETTKPAGKRTADGSEFEKRTADGSEFESPKKKAKVE

SEQ ID NO: 7307 - protein, 2102 aa, synthetic construct
MPAAKRVKLDGGDKKYSIGLDIGTNSVGWAVITDEYKVPSKKFKVLGNTDRHSIKKNLIGALLFDSGETAEATRLKRTARRRYTRRKNRICYLQEIFSNEMAKVDDSFFHRLEESFLVEEDKKHERHPIFGNIVDEVAYHEKYPTIYHLRKKLVDSTDKADLRLIYLALAHMIKFRGHFLIEGDLNPDNSDVDKLFIQLVQTYNQLFEENPINASGVDAKAILSARLSKSRRLENLIAQLPGEKKNGLFGNLIALSLGLTPNFKSNFDLAEDAKLQLSKDTYDDDLDNLLAQIGDQYADLFLAAKNLSDAILLSDILRVNTEITKAPLSASMIKRYDEHHQDLTLLKALVRQQLPEKYKEIFFDQSKNGYAGYIDGGASQEEFYKFIKPILEKMDGTEELLVKLNREDLLRKQRTFDNGSIPHQIHLGELHAILRRQEDFYPFLKDNREKIEKILTFRIPYYVGPLARGNSRFAWMTRKSEETITPWNFEEVVDKGASAQSFIERMTNFDKNLPNEKVLPKHSLLYEYFTVYNELTKVKYVTEGMRKPAFLSGEQKKAIVDLLFKTNRKVTVKQLKEDYFKKIECFDSVEISGVEDRFNASLGTYHDLLKIIKDKDFLDNEENEDILEDIVLTLTLFEDREMIEERLKTYAHLFDDKVMKQLKRRRYTGWGRLSRKLINGIRDKQSGKTILDFLKSDGFANRNFMQLIHDDSLTFKEDIQKAQVSGQGDSLHEHIANLAGSPAIKKGILQTVKVVDELVKVMGRHKPENIVIEMARENQTTQKGQKNSRERMKRIEEGIKELGSQILKEHPVENTQLQNEKLYLYYLQNGRDMYVDQELDINRLSDYDVDHIVPQSFLKDDSIDNKVLTRSDKARGKSDNVPSEEVVKKMKNYWRQLLNAKLITQRKFDNLTKAERGGLSELDKAGFIKRQLVETRQITKHVAQILDSRMNTKYDENDKLIREVKVITLKSKLVSDFRKDFQFYKVREINNYHHAHDAYLNAVVGTALIKKYPKLESEFVYGDYKVYDVRKMIAKSEQEIGKATAKYFFYSNIMNFFKTEITLANGEIRKRPLIETNGETGEIVWDKGRDFATVRKVLSMPQVNIVKKTEVQTGGFSKESILPKRNSDKLIARKKDWDPKKYGGFDSPTVAYSVLVVAKVEKGKSKKLKSVKELLGITIMERSSFEKNPIDFLEAKGYKEVKKDLIIKLPKYSLFELENGRKRMLASAGELQKGNELALPSKYVNFLYLASHYEKLKGSPEDNEQKQLFVEQHKHYLDEIIEQISEFSKRVILADANLDKVLSAYNKHRDKPIREQAENIIHLFTLTNLGAPAAFKYFDTTIDRKRYTSTKEVLDATLIHQSITGLYETRIDLSQLGGDGGGSSEAAAKGGGGGTVSLQDEHRLFDIPVTTSLPDVWLQDFPQAWAETGGLGRAKCQAPIIIDLKPTAVPVSIKQYPMSLEAHMGIRQHIIKFLELGVLRPCRSPWNTPLLPVKKPGTQDYRPVQDLREINKRTVDIHPTVPNPYNLLSTLKPDYSWYTVLDLKDAFFCLPLAPQSQELFAFEWKDPERGISGQLTWTRLPQGFKNSPTLFNEALHRDLTDFRTQHPEVTLLQYVDDLLLAAPTKKACTQGTRHLLQELGEKGYRASAKKAQICQTKVTYLGYILSEGKRWLTPGRIETVARIPPPRNPREVREFLGTAGFCRLWIPGFAELAAPLYALTKPSTPFTWQTEHQLAFEALKKALLSAPALGLPDTSKPFTLFLDERQGIAKGVLTQKLGPWKRPVAYLSKKLDPVAAGWPPCLRIMAATAMLVKDSAKLTLGQPLTVITPHTLEAIVRQPPDRWITNARLTHYQALLLDTDRVQFGPPVTLNPATLLPVPENQPSPHDCRQVLAETHGTREDLKDQELPDADHTWYTDGSSYLDSGTRRAGAAVVDGHNTIWAQSLPPGTSAQKAELIALTKALELSKGKKANIYTDSRYAFATAHTHGSIYERRGWLTSEGKEIKNKAEIIALLKALFLPQEVAIIHCPGHQKGQDPVAVGNRQADRVARQAAMAEVLTLATEPDNTSHITAGKRTADGSEFEKRTADGSEFESPKKKAKVE

SEQ ID NO: 7308 - protein, 2173 aa, synthetic construct
MPAAKRVKLDGGDKKYSIGLDIGTNSVGWAVITDEYKVPSKKFKVLGNTDRHSIKKNLIGALLFDSGETAEATRLKRTARRRYTRRKNRICYLQEIFSNEMAKVDDSFFHRLEESFLVEEDKKHERHPIFGNIVDEVAYHEKYPTIYHLRKKLVDSTDKADLRLIYLALAHMIKFRGHFLIEGDLNPDNSDVDKLFIQLVQTYNQLFEENPINASGVDAKAILSARLSKSRRLENLIAQLPGEKKNGLFGNLIALSLGLTPNFKSNFDLAEDAKLQLSKDTYDDDLDNLLAQIGDQYADLFLAAKNLSDAILLSDILRVNTEITKAPLSASMIKRYDEHHQDLTLLKALVRQQLPEKYKEIFFDQSKNGYAGYIDGGASQEEFYKFIKPILEKMDGTEELLVKLNREDLLRKQRTFDNGSIPHQIHLGELHAILRRQEDFYPFLKDNREKIEKILTFRIPYYVGPLARGNSRFAWMTRKSEETITPWNFEEVVDKGASAQSFIERMTNFDKNLPNEKVLPKHSLLYEYFTVYNELTKVKYVTEGMRKPAFLSGEQKKAIVDLLFKTNRKVTVKQLKEDYFKKIECFDSVEISGVEDRFNASLGTYHDLLKIIKDKDFLDNEENEDILEDIVLTLTLFEDREMIEERLKTYAHLFDDKVMKQLKRRRYTGWGRLSRKLINGIRDKQSGKTILDFLKSDGFANRNFMQLIHDDSLTFKEDIQKAQVSGQGDSLHEHIANLAGSPAIKKGILQTVKVVDELVKVMGRHKPENIVIEMARENQTTQKGQKNSRERMKRIEEGIKELGSQILKEHPVENTQLQNEKLYLYYLQNGRDMYVDQELDINRLSDYDVDHIVPQSFLKDDSIDNKVLTRSDKARGKSDNVPSEEVVKKMKNYWRQLLNAKLITQRKFDNLTKAERGGLSELDKAGFIKRQLVETRQITKHVAQILDSRMNTKYDENDKLIREVKVITLKSKLVSDFRKDFQFYKVREINNYHHAHDAYLNAVVGTALIKKYPKLESEFVYGDYKVYDVRKMIAKSEQEIGKATAKYFFYSNIMNFFKTEITLANGEIRKRPLIETNGETGEIVWDKGRDFATVRKVLSMPQVNIVKKTEVQTGGFSKESILPKRNSDKLIARKKDWDPKKYGGFDSPTVAYSVLVVAKVEKGKSKKLKSVKELLGITIMERSSFEKNPIDFLEAKGYKEVKKDLIIKLPKYSLFELENGRKRMLASAGELQKGNELALPSKYVNFLYLASHYEKLKGSPEDNEQKQLFVEQHKHYLDEIIEQISEFSKRVILADANLDKVLSAYNKHRDKPIREQAENIIHLFTLTNLGAPAAFKYFDTTIDRKRYTSTKEVLDATLIHQSITGLYETRIDLSQLGGDGGGSSEAAAKGGGGGMDLLKPLTVERKGVKIKGYWNSQADITCVPKDLLQGEEPVRQQNVTTIHGTQEGDVYYVNLKIDGRRINTEVIGTTLDYAIITPGDVPWILKKPLELTIKLDLEEQQGTLLNNSILSKKGKEELKQLFEKYSALWQSWENQVGHRRIRPHKIATGTVKPTPQKQYHINPKAKPDIQIVINDLLKQGVLIQKESTMNTPVYPVPKPNGRWRMVLDYRAVNKVTPLIAVQNQHSYGILGSLFKGRYKTTIDLSNGFWAHPIVPEDYWITAFTWQGKQYCWTVLPQGFLNSPGLFNGDVVDLLQGIPNVEVYVDDVYISHDSEKEHLEYLDILFNRLKEAGYIISLKKSNIANSIVDFLGFQITNEGRGLTDTFKEKLENITAPTTLKQLQSILGKLNFARNFIPDFTELIAPLYALIPKSPKNYVPWQIEHSTTLETLITKLNGAEYLQGRKGDKTLIMKVNASYTTGYIRYYNEGEKKPISYVSIVFSKTELKFTELEKLLTTVHKGLLKALDLSMGQNIHVYSPIVSMQNIQKTPQTAKKALASRWLSWLSYLEDPRIRFFYDPQMPALKDLPAVDTGKDNKKHPSNFQHIFYTDGSAITSPTKEGHLNAGMGIVYFINKDGNLQKQQEWSISLGNHTAQFAEIAAFEFALKKCLPLGGNILVVTDSNYVAKAYNEELDVWASNGFVNNRKKPLKHISKWKSVADLKRLRPDVVVTHEPGHQKLDSSPHAYGNNLADQLATQASFKVHAGKRTADGSEFEKRTADGSEFESPKKKAKVE

SEQ ID NO: 7309 - protein, 2095 aa, synthetic construct
MPAAKRVKLDGGDKKYSIGLDIGTNSVGWAVITDEYKVPSKKFKVLGNTDRHSIKKNLIGALLFDSGETAEATRLKRTARRRYTRRKNRICYLQEIFSNEMAKVDDSFFHRLEESFLVEEDKKHERHPIFGNIVDEVAYHEKYPTIYHLRKKLVDSTDKADLRLIYLALAHMIKFRGHFLIEGDLNPDNSDVDKLFIQLVQTYNQLFEENPINASGVDAKAILSARLSKSRRLENLIAQLPGEKKNGLFGNLIALSLGLTPNFKSNFDLAEDAKLQLSKDTYDDDLDNLLAQIGDQYADLFLAAKNLSDAILLSDILRVNTEITKAPLSASMIKRYDEHHQDLTLLKALVRQQLPEKYKEIFFDQSKNGYAGYIDGGASQEEFYKFIKPILEKMDGTEELLVKLNREDLLRKQRTFDNGSIPHQIHLGELHAILRRQEDFYPFLKDNREKIEKILTFRIPYYVGPLARGNSRFAWMTRKSEETITPWNFEEVVDKGASAQSFIERMTNFDKNLPNEKVLPKHSLLYEYFTVYNELTKVKYVTEGMRKPAFLSGEQKKAIVDLLFKTNRKVTVKQLKEDYFKKIECFDSVEISGVEDRFNASLGTYHDLLKIIKDKDFLDNEENEDILEDIVLTLTLFEDREMIEERLKTYAHLFDDKVMKQLKRRRYTGWGRLSRKLINGIRDKQSGKTILDFLKSDGFANRNFMQLIHDDSLTFKEDIQKAQVSGQGDSLHEHIANLAGSPAIKKGILQTVKVVDELVKVMGRHKPENIVIEMARENQTTQKGQKNSRERMKRIEEGIKELGSQILKEHPVENTQLQNEKLYLYYLQNGRDMYVDQELDINRLSDYDVDHIVPQSFLKDDSIDNKVLTRSDKARGKSDNVPSEEVVKKMKNYWRQLLNAKLITQRKFDNLTKAERGGLSELDKAGFIKRQLVETRQITKHVAQILDSRMNTKYDENDKLIREVKVITLKSKLVSDFRKDFQFYKVREINNYHHAHDAYLNAVVGTALIKKYPKLESEFVYGDYKVYDVRKMIAKSEQEIGKATAKYFFYSNIMNFFKTEITLANGEIRKRPLIETNGETGEIVWDKGRDFATVRKVLSMPQVNIVKKTEVQTGGFSKESILPKRNSDKLIARKKDWDPKKYGGFDSPTVAYSVLVVAKVEKGKSKKLKSVKELLGITIMERSSFEKNPIDFLEAKGYKEVKKDLIIKLPKYSLFELENGRKRMLASAGELQKGNELALPSKYVNFLYLASHYEKLKGSPEDNEQKQLFVEQHKHYLDEIIEQISEFSKRVILADANLDKVLSAYNKHRDKPIREQAENIIHLFTLTNLGAPAAFKYFDTTIDRKRYTSTKEVLDATLIHQSITGLYETRIDLSQLGGDGGGSSEAAAKGGGGGTLQLEEEYRLFEPESTQKQEMDIWLKNFPQAWAETGGMGTAHCQAPVLIQLKATATPISIRQYPMPHEAYQGIKPHIRRMLDQGILKPCQSPWNTPLLPVKKPGTEDYRPVQDLREVNKRVEDIHPTVPNPYNLLSTLPPSHPWYTVLDLKDAFFCLRLHSESQLLFAFEWRDPEIGLSGQLTWTRLPQGFKNSPTLFNEALHSDLADFRVRYPALVLLQYVDDLLLAAATRTECLEGTKALLETLGNKGYRASAKKAQICLQEVTYLGYSLKDGQRWLTKARKEAILSIPVPKNSRQVREFLGKAGYCRLFIPGFAELAAPLYPLTRPGTLFQWGTEQQLAFEDIKKALLSSPALGLPDITKPFELFIDENSGFAKGVLVQKLGPWKRPVAYLSKKLDTVASGWPPCLRMVAAIAILVKDAGKLTLGQPLTILTSHPVEALVRQPPNKWLSNARMTHYQAMLLDAERVHFGPTVSLNPATLLPLPSGGNHHDCLQILAETHGTRPDLTDQPLPDADLTWYTDGSSFIRNGEREAGAAVTTESEVIWAAPLPPGTSAQRAELIALTQALKMAEGKKLTVYTDSRYAFATTHVHGEIYRRRGWLTSEGKEIKNKNEILALLEALFLPKRLSIIHCPGHQKGDSPQAKGNRLADDTAKKAATETHSSLTVLPAGKRTADGSEFEKRTADGSEFESPKKKAKVE

SEQ ID NO: 7310 - protein, 2094 aa, synthetic construct
MPAAKRVKLDGGDKKYSIGLDIGTNSVGWAVITDEYKVPSKKFKVLGNTDRHSIKKNLIGALLFDSGETAEATRLKRTARRRYTRRKNRICYLQEIFSNEMAKVDDSFFHRLEESFLVEEDKKHERHPIFGNIVDEVAYHEKYPTIYHLRKKLVDSTDKADLRLIYLALAHMIKFRGHFLIEGDLNPDNSDVDKLFIQLVQTYNQLFEENPINASGVDAKAILSARLSKSRRLENLIAQLPGEKKNGLFGNLIALSLGLTPNFKSNFDLAEDAKLQLSKDTYDDDLDNLLAQIGDQYADLFLAAKNLSDAILLSDILRVNTEITKAPLSASMIKRYDEHHQDLTLLKALVRQQLPEKYKEIFFDQSKNGYAGYIDGGASQEEFYKFIKPILEKMDGTEELLVKLNREDLLRKQRTFDNGSIPHQIHLGELHAILRRQEDFYPFLKDNREKIEKILTFRIPYYVGPLARGNSRFAWMTRKSEETITPWNFEEVVDKGASAQSFIERMTNFDKNLPNEKVLPKHSLLYEYFTVYNELTKVKYVTEGMRKPAFLSGEQKKAIVDLLFKTNRKVTVKQLKEDYFKKIECFDSVEISGVEDRFNASLGTYHDLLKIIKDKDFLDNEENEDILEDIVLTLTLFEDREMIEERLKTYAHLFDDKVMKQLKRRRYTGWGRLSRKLINGIRDKQSGKTILDFLKSDGFANRNFMQLIHDDSLTFKEDIQKAQVSGQGDSLHEHIANLAGSPAIKKGILQTVKVVDELVKVMGRHKPENIVIEMARENQTTQKGQKNSRERMKRIEEGIKELGSQILKEHPVENTQLQNEKLYLYYLQNGRDMYVDQELDINRLSDYDVDHIVPQSFLKDDSIDNKVLTRSDKARGKSDNVPSEEVVKKMKNYWRQLLNAKLITQRKFDNLTKAERGGLSELDKAGFIKRQLVETRQITKHVAQILDSRMNTKYDENDKLIREVKVITLKSKLVSDFRKDFQFYKVREINNYHHAHDAYLNAVVGTALIKKYPKLESEFVYGDYKVYDVRKMIAKSEQEIGKATAKYFFYSNIMNFFKTEITLANGEIRKRPLIETNGETGEIVWDKGRDFATVRKVLSMPQVNIVKKTEVQTGGFSKESILPKRNSDKLIARKKDWDPKKYGGFDSPTVAYSVLVVAKVEKGKSKKLKSVKELLGITIMERSSFEKNPIDFLEAKGYKEVKKDLIIKLPKYSLFELENGRKRMLASAGELQKGNELALPSKYVNFLYLASHYEKLKGSPEDNEQKQLFVEQHKHYLDEIIEQISEFSKRVILADANLDKVLSAYNKHRDKPIREQAENIIHLFTLTNLGAPAAFKYFDTTIDRKRYTSTKEVLDATLIHQSITGLYETRIDLSQLGGDGGGSSEAAAKGGGGGVLNLEEEYRLHEKPVPSSIDPSWLQLFPTVWAERAGMGLANQVPPVVVELRSGASPVAVRQYPMSKEAREGIRPHIQKFLDLGVLVPCRSPWNTPLLPVKKPGTNDYRPVQDLREINKRVQDIHPTVPNPYNLLSSLPPSYTWYSVLDLKDAFFCLRLHPNSQPLFAFEWKDPEKGNTGQLTWTRLPQGFKNSPTLFNEALHRDLAPFRALNPQVVLLQYVDDLLVAAPTYEDCKKGTQKLLQELSKLGYRVSAKKAQLCQREVTYLGYLLKEGKRWLTPARKATVMKIPVPTTPRQVREFLGKAGFCRLFIPGFASLAAPLYPLTKPSIPFIWTEEHQQAFDHIKKALLSAPALALPDLTKPFTLYIDERAGVARGVLTQTLGPWRRPVAYLSKKLDPVASGWPTCLKAVAAVALLLKDADKLTLGQNVTVIASHSLESIVRQPPDRWMTNARMTHYQSLLLNERVSFAPPAVLNPATLLPVESEATPVHRCSEILAEETGTRRDLEDQPLPGVPTWYTDGSSFITEGKRRAGAPIVDGKRTVWASSLPEGTSAQKAELVALTQALRLAEGKNINIYTDSRYAFATAHIHGAIYKQRGWLTSAGKDIKNKEEILALLEAIHLPRRVAIIHCPGHQRGSNPVATGNRRADEAAKQAALSTRVLAGTTKPAGKRTADGSEFEKRTADGSEFESPKKKAKVE

SEQ ID NO: 7311 - protein, 2218 aa, synthetic construct
MPAAKRVKLDGGDKKYSIGLDIGTNSVGWAVITDEYKVPSKKFKVLGNTDRHSIKKNLIGALLFDSGETAEATRLKRTARRRYTRRKNRICYLQEIFSNEMAKVDDSFFHRLEESFLVEEDKKHERHPIFGNIVDEVAYHEKYPTIYHLRKKLVDSTDKADLRLIYLALAHMIKFRGHFLIEGDLNPDNSDVDKLFIQLVQTYNQLFEENPINASGVDAKAILSARLSKSRRLENLIAQLPGEKKNGLFGNLIALSLGLTPNFKSNFDLAEDAKLQLSKDTYDDDLDNLLAQIGDQYADLFLAAKNLSDAILLSDILRVNTEITKAPLSASMIKRYDEHHQDLTLLKALVRQQLPEKYKEIFFDQSKNGYAGYIDGGASQEEFYKFIKPILEKMDGTEELLVKLNREDLLRKQRTFDNGSIPHQIHLGELHAILRRQEDFYPFLKDNREKIEKILTFRIPYYVGPLARGNSRFAWMTRKSEETITPWNFEEVVDKGASAQSFIERMTNFDKNLPNEKVLPKHSLLYEYFTVYNELTKVKYVTEGMRKPAFLSGEQKKAIVDLLFKTNRKVTVKQLKEDYFKKIECFDSVEISGVEDRFNASLGTYHDLLKIIKDKDFLDNEENEDILEDIVLTLTLFEDREMIEERLKTYAHLFDDKVMKQLKRRRYTGWGRLSRKLINGIRDKQSGKTILDFLKSDGFANRNFMQLIHDDSLTFKEDIQKAQVSGQGDSLHEHIANLAGSPAIKKGILQTVKVVDELVKVMGRHKPENIVIEMARENQTTQKGQKNSRERMKRIEEGIKELGSQILKEHPVENTQLQNEKLYLYYLQNGRDMYVDQELDINRLSDYDVDHIVPQSFLKDDSIDNKVLTRSDKARGKSDNVPSEEVVKKMKNYWRQLLNAKLITQRKFDNLTKAERGGLSELDKAGFIKRQLVETRQITKHVAQILDSRMNTKYDENDKLIREVKVITLKSKLVSDFRKDFQFYKVREINNYHHAHDAYLNAVVGTALIKKYPKLESEFVYGDYKVYDVRKMIAKSEQEIGKATAKYFFYSNIMNFFKTEITLANGEIRKRPLIETNGETGEIVWDKGRDFATVRKVLSMPQVNIVKKTEVQTGGFSKESILPKRNSDKLIARKKDWDPKKYGGFDSPTVAYSVLVVAKVEKGKSKKLKSVKELLGITIMERSSFEKNPIDFLEAKGYKEVKKDLIIKLPKYSLFELENGRKRMLASAGELQKGNELALPSKYVNFLYLASHYEKLKGSPEDNEQKQLFVEQHKHYLDEIIEQISEFSKRVILADANLDKVLSAYNKHRDKPIREQAENIIHLFTLTNLGAPAAFKYFDTTIDRKRYTSTKEVLDATLIHQSITGLYETRIDLSQLGGDGGGSSEAAAKGGGGGTLGDQGSRGSDPLPEPRVTLTVEGIPTEFLVNTGAEHSVLTKPMGKMGSKRTVVAGATGSKVYPWTTKRLLKIGQKQVTHSFLVIPECPAPLLGRDLLTKLKAQIQFSTEGPQVTWEDRPAMCLVLNLEEEYRLHEKPVPPSIDPSWLQLFPMVWAEKAGMGLANQVPPVVVELKSDASPVAVRQYPMSKEAREGIRPHIQRFLDLGILVPCQSPWNTPLLPVKKPGTNDYRPVQDLREVNKRVQDIHPTVPNPYNLLSSLPPSHTWYSVLDLKDAFFCLKLHPNSQPLFAFEWRDPEKGNTGQLTWTRLPQGFKNSPTLFNEALHRDLASFRALNPQVVMLQYVDDLLVAAPTYRDCKEGTRRLLQELSKLGYRVSAKKAQLCREEVTYLGYLLKGGKRWLTPARKATVMKIPTPTTPRQVREFLGTAGFCRLWIPGFASLAAPLYPLTRPKVPFTWTEAHQEAFGRIKEALLSAPALALPDLTKPFALYVDEKEGVARGVLTQTLGPWRRPVAYLSKKLDPVASGWPTCLKAIAAVALLLKDADKLTLGQNVLVIAPHNLESIVRQPPDRWMTNARMTHYQSLLLNERVSFAPPAILNPATLLPVESDDTPIHICSEILAEETGTRPDLRDQPLPGVPAWYTDGSSFIMDGRRQAGAAIVDNKRTVWASNLPEGTSAQKAELIALTQALRLAEGKSINIYTDSRYAFATAHVHGAIYKQRGWLTSAGKDIKNKEEILALLEAIHLPKRVAIIHCPGHQRGTDPVATGNRKADEAAKQAAQSTRILTETTKNAGKRTADGSEFEKRTADGSEFESPKKKAKVE

SEQ ID NO: 7312 - protein, 2096 aa, synthetic construct
MPAAKRVKLDGGDKKYSIGLDIGTNSVGWAVITDEYKVPSKKFKVLGNTDRHSIKKNLIGALLFDSGETAEATRLKRTARRRYTRRKNRICYLQEIFSNEMAKVDDSFFHRLEESFLVEEDKKHERHPIFGNIVDEVAYHEKYPTIYHLRKKLVDSTDKADLRLIYLALAHMIKFRGHFLIEGDLNPDNSDVDKLFIQLVQTYNQLFEENPINASGVDAKAILSARLSKSRRLENLIAQLPGEKKNGLFGNLIALSLGLTPNFKSNFDLAEDAKLQLSKDTYDDDLDNLLAQIGDQYADLFLAAKNLSDAILLSDILRVNTEITKAPLSASMIKRYDEHHQDLTLLKALVRQQLPEKYKEIFFDQSKNGYAGYIDGGASQEEFYKFIKPILEKMDGTEELLVKLNREDLLRKQRTFDNGSIPHQIHLGELHAILRRQEDFYPFLKDNREKIEKILTFRIPYYVGPLARGNSRFAWMTRKSEETITPWNFEEVVDKGASAQSFIERMTNFDKNLPNEKVLPKHSLLYEYFTVYNELTKVKYVTEGMRKPAFLSGEQKKAIVDLLFKTNRKVTVKQLKEDYFKKIECFDSVEISGVEDRFNASLGTYHDLLKIIKDKDFLDNEENEDILEDIVLTLTLFEDREMIEERLKTYAHLFDDKVMKQLKRRRYTGWGRLSRKLINGIRDKQSGKTILDFLKSDGFANRNFMQLIHDDSLTFKEDIQKAQVSGQGDSLHEHIANLAGSPAIKKGILQTVKVVDELVKVMGRHKPENIVIEMARENQTTQKGQKNSRERMKRIEEGIKELGSQILKEHPVENTQLQNEKLYLYYLQNGRDMYVDQELDINRLSDYDVDHIVPQSFLKDDSIDNKVLTRSDKARGKSDNVPSEEVVKKMKNYWRQLLNAKLITQRKFDNLTKAERGGLSELDKAGFIKRQLVETRQITKHVAQILDSRMNTKYDENDKLIREVKVITLKSKLVSDFRKDFQFYKVREINNYHHAHDAYLNAVVGTALIKKYPKLESEFVYGDYKVYDVRKMIAKSEQEIGKATAKYFFYSNIMNFFKTEITLANGEIRKRPLIETNGETGEIVWDKGRDFATVRKVLSMPQVNIVKKTEVQTGGFSKESILPKRNSDKLIARKKDWDPKKYGGFDSPTVAYSVLVVAKVEKGKSKKLKSVKELLGITIMERSSFEKNPIDFLEAKGYKEVKKDLIIKLPKYSLFELENGRKRMLASAGELQKGNELALPSKYVNFLYLASHYEKLKGSPEDNEQKQLFVEQHKHYLDEIIEQISEFSKRVILADANLDKVLSAYNKHRDKPIREQAENIIHLFTLTNLGAPAAFKYFDTTIDRKRYTSTKEVLDATLIHQSITGLYETRIDLSQLGGDGGGSSEAAAKGGGGGLGIEDEYRLHETSTEPDVSLGSTWLSDFPQAWAETGGMGLAVRQAPLIIPLKATSTPVSIQQYPMSHEARLGIKPHIQRLLDQGILVPCQSPWNTPLLPVKKPGTNDYRPVQDLREVNKRVEDIHPTVPNPYNLLSGLPPSHQWYTVLDLKDAFFCLRLHPTSQPLFAFEWRDPGMGISGQLTWTRLPQGFKNSPTLFNEALHRDLADFRIQHPDLILLQYVDDILLAATSELDCQQGTRALLQTLGDLGYRASAKKAQICQKQVKYLGYLLREGQRWLTEARKETVMGQPVPKTPRQLREFLGKAGFCRLFIPGFAEMAAPLYPLTKPGTLFSWGPDQQKAYQEIKQALLTAPALGLPDLTKPFELFVDEKQGYAKGVLTQKLGPWRRPVAYLSKKLDPVAAGWPPCLRMVAAIAVLTKDAGKLTMGQPLVILAPHAVEALVKQPPDRWLSNARMTHYQAMLLDTDRVQFGPVVALNPATLLPLPEEGAPHDCLEILAETHGTRPDLTDQPIPDADHTWYTDGSSFLQEGQRKAGAAVTTETEVIWAGALPAGTSAQRAELIALTQALKMAEGKRLNVYTDSRYAFATAHIHGEIYRRRGWLTSEGREIKNKSEILALLKALFLPKRLSIIHCLGHQKGDSAEARGNRLADQAAREAAIKTPPDTSTLLIAGKRTADGSEFEKRTADGSEFESPKKKAKVE

SEQ ID NO: 7313 - protein, 2116 aa, synthetic construct
MPAAKRVKLDGGDKKYSIGLDIGTNSVGWAVITDEYKVPSKKFKVLGNTDRHSIKKNLIGALLFDSGETAEATRLKRTARRRYTRRKNRICYLQEIFSNEMAKVDDSFFHRLEESFLVEEDKKHERHPIFGNIVDEVAYHEKYPTIYHLRKKLVDSTDKADLRLIYLALAHMIKFRGHFLIEGDLNPDNSDVDKLFIQLVQTYNQLFEENPINASGVDAKAILSARLSKSRRLENLIAQLPGEKKNGLFGNLIALSLGLTPNFKSNFDLAEDAKLQLSKDTYDDDLDNLLAQIGDQYADLFLAAKNLSDAILLSDILRVNTEITKAPLSASMIKRYDEHHQDLTLLKALVRQQLPEKYKEIFFDQSKNGYAGYIDGGASQEEFYKFIKPILEKMDGTEELLVKLNREDLLRKQRTFDNGSIPHQIHLGELHAILRRQEDFYPFLKDNREKIEKILTFRIPYYVGPLARGNSRFAWMTRKSEETITPWNFEEVVDKGASAQSFIERMTNFDKNLPNEKVLPKHSLLYEYFTVYNELTKVKYVTEGMRKPAFLSGEQKKAIVDLLFKTNRKVTVKQLKEDYFKKIECFDSVEISGVEDRFNASLGTYHDLLKIIKDKDFLDNEENEDILEDIVLTLTLFEDREMIEERLKTYAHLFDDKVMKQLKRRRYTGWGRLSRKLINGIRDKQSGKTILDFLKSDGFANRNFMQLIHDDSLTFKEDIQKAQVSGQGDSLHEHIANLAGSPAIKKGILQTVKVVDELVKVMGRHKPENIVIEMARENQTTQKGQKNSRERMKRIEEGIKELGSQILKEHPVENTQLQNEKLYLYYLQNGRDMYVDQELDINRLSDYDVDHIVPQSFLKDDSIDNKVLTRSDKARGKSDNVPSEEVVKKMKNYWRQLLNAKLITQRKFDNLTKAERGGLSELDKAGFIKRQLVETRQITKHVAQILDSRMNTKYDENDKLIREVKVITLKSKLVSDFRKDFQFYKVREINNYHHAHDAYLNAVVGTALIKKYPKLESEFVYGDYKVYDVRKMIAKSEQEIGKATAKYFFYSNIMNFFKTEITLANGEIRKRPLIETNGETGEIVWDKGRDFATVRKVLSMPQVNIVKKTEVQTGGFSKESILPKRNSDKLIARKKDWDPKKYGGFDSPTVAYSVLVVAKVEKGKSKKLKSVKELLGITIMERSSFEKNPIDFLEAKGYKEVKKDLIIKLPKYSLFELENGRKRMLASAGELQKGNELALPSKYVNFLYLASHYEKLKGSPEDNEQKQLFVEQHKHYLDEIIEQISEFSKRVILADANLDKVLSAYNKHRDKPIREQAENIIHLFTLTNLGAPAAFKYFDTTIDRKRYTSTKEVLDATLIHQSITGLYETRIDLSQLGGDGGGSSEAAAKGGGGGTLNIEDEYRLHETSKEPDVSLGSTWLSDFPQAWAETGGMGLAVRQAPLIIPLKATSTPVSIKQYPMSQEARLGIKPHIQRLLDQGILVPCQSPWNTPLLPVKKPGTNDYRPVQDLREVNKRVEDIHPTVPNPYNLLSGLPPSHQWYTVLDLKDAFFCLRLHPTSQPLFAFEWRDPEMGISGQLTWTRLPQGFKNSPTLFNEALHRDLADFRIQHPDLILLQYVDDLLLAATSELDCQQGTRALLQTLGNLGYRASAKKAQICQKQVKYLGYLLKEGQRWLTEARKETVMGQPTPKTPRQLREFLGKAGFCRLFIPGFAEMAAPLYPLTKPGTLFNWGPDQQKAYQEIKQALLTAPALGLPDLTKPFELFVDEKQGYAKGVLTQKLGPWRRPVAYLSKKLDPVAAGWPPCLRMVAAIAVLTKDAGKLTMGQPLVILAPHAVEALVKQPPDRWLSNARMTHYQALLLDTDRVQFGPVVALNPATLLPLPEEGLQHNCLDILAEAHGTRPDLTDQPLPDADHTWYTDGSSLLQEGQRKAGAAVTTETEVIWAKALPAGTSAQRAELIALTQALKMAEGKKLNVYTDSRYAFATAHIHGEIYRRRGWLTSEGKEIKNKDEILALLKALFLPKRLSIIHCPGHQKGHSAEARGNRMADQAARKAAITETPDTSTLLIENSSPSGGSKRTADGSEFEAGKRTADGSEFEKRTADGSEFESPKKKAKVE

SEQ ID NO: 7314 - protein, 2116 aa, synthetic construct; identical to SEQ ID NO: 7313

SEQ ID NO: 7315 - protein, 2087 aa, synthetic construct
MPAAKRVKLDGGDKKYSIGLDIGTNSVGWAVITDEYKVPSKKFKVLGNTDRHSIKKNLIGALLFDSGETAEATRLKRTARRRYTRRKNRICYLQEIFSNEMAKVDDSFFHRLEESFLVEEDKKHERHPIFGNIVDEVAYHEKYPTIYHLRKKLVDSTDKADLRLIYLALAHMIKFRGHFLIEGDLNPDNSDVDKLFIQLVQTYNQLFEENPINASGVDAKAILSARLSKSRRLENLIAQLPGEKKNGLFGNLIALSLGLTPNFKSNFDLAEDAKLQLSKDTYDDDLDNLLAQIGDQYADLFLAAKNLSDAILLSDILRVNTEITKAPLSASMIKRYDEHHQDLTLLKALVRQQLPEKYKEIFFDQSKNGYAGYIDGGASQEEFYKFIKPILEKMDGTEELLVKLNREDLLRKQRTFDNGSIPHQIHLGELHAILRRQEDFYPFLKDNREKIEKILTFRIPYYVGPLARGNSRFAWMTRKSEETITPWNFEEVVDKGASAQSFIERMTNFDKNLPNEKVLPKHSLLYEYFTVYNELTKVKYVTEGMRKPAFLSGEQKKAIVDLLFKTNRKVTVKQLKEDYFKKIECFDSVEISGVEDRFNASLGTYHDLLKIIKDKDFLDNEENEDILEDIVLTLTLFEDREMIEERLKTYAHLFDDKVMKQLKRRRYTGWGRLSRKLINGIRDKQSGKTILDFLKSDGFANRNFMQLIHDDSLTFKEDIQKAQVSGQGDSLHEHIANLAGSPAIKKGILQTVKVVDELVKVMGRHKPENIVIEMARENQTTQKGQKNSRERMKRIEEGIKELGSQILKEHPVENTQLQNEKLYLYYLQNGRDMYVDQELDINRLSDYDVDHIVPQSFLKDDSIDNKVLTRSDKARGKSDNVPSEEVVKKMKNYWRQLLNAKLITQRKFDNLTKAERGGLSELDKAGFIKRQLVETRQITKHVAQILDSRMNTKYDENDKLIREVKVITLKSKLVSDFRKDFQFYKVREINNYHHAHDAYLNAVVGTALIKKYPKLESEFVYGDYKVYDVRKMIAKSEQEIGKATAKYFFYSNIMNFFKTEITLANGEIRKRPLIETNGETGEIVWDKGRDFATVRKVLSMPQVNIVKKTEVQTGGFSKESILPKRNSDKLIARKKDWDPKKYGGFDSPTVAYSVLVVAKVEKGKSKKLKSVKELLGITIMERSSFEKNPIDFLEAKGYKEVKKDLIIKLPKYSLFELENGRKRMLASAGELQKGNELALPSKYVNFLYLASHYEKLKGSPEDNEQKQLFVEQHKHYLDEIIEQISEFSKRVILADANLDKVLSAYNKHRDKPIREQAENIIHLFTLTNLGAPAAFKYFDTTIDRKRYTSTKEVLDATLIHQSITGLYETRIDLSQLGGDGGGSSEAAAKGGGGGIPWLMKKPLQLTTLVPLQEYEERLLKQTMLTGSYKEKLQSLFLKYDALWQHWENQVGHRRIKPHHIATGTVNPRPQKQYPINPKAKASIQTVINDLLKQGVLIQQNSIMNTPVYPVPKPDGKWRMVLDYREVNKTIPLIAAQNQHSAGILSSIFRGKYKTTLDLSNGFWAHSITPESYWLTAFTWLGQQYCWTRLPQGFLNSPALFNADVVDLLKEVPNVQVYVDDIYISHDDPREHLEQLEKVFSLLLNAGYVVSLKKSEIAQHEVEFLGFNITKEGRGLTETFKQKLLNITPPRDLKQLQSILGLLNFARNFIPNFSELVKPLYNIIATAPGKYITWTTDNSQQLQNIISMLNSAENLEERNPEVRLIMKVNTSPSAGYIRFYNEFAKRPIMYLNYVYTKAEVKFTNTEKLLTTIHKGLIKALDLGMGQEILVYSPIVSMTKIQKTPLPERKALPIRWITWMSYLEDPRIQFHYDKTLPELQQVPTVTDDIIAKIKHPSEFSMVFYTDGSAIKHPNVNKSHNAGMGIAQVQFKPEFTVINTWSIPLGDHTAQLAEVAAVEFACKKALKIDGPVLIVTDSFYVAESVNKELPYWQSNGFFNNKKKPLKHVSKWKSIADCIQLKPDIIIIHEKGHQPTASTFHTEGNNLADKLATQGSYVVNAGKRTADGSEFEKRTADGSEFESPKKKAKVE

SEQ ID NO: 7316 - protein, 2096 aa, synthetic construct
MPAAKRVKLDGGDKKYSIGLDIGTNSVGWAVITDEYKVPSKKFKVLGNTDRHSIKKNLIGALLFDSGETAEATRLKRTARRRYTRRKNRICYLQEIFSNEMAKVDDSFFHRLEESFLVEEDKKHERHPIFGNIVDEVAYHEKYPTIYHLRKKLVDSTDKADLRLIYLALAHMIKFRGHFLIEGDLNPDNSDVDKLFIQLVQTYNQLFEENPINASGVDAKAILSARLSKSRRLENLIAQLPGEKKNGLFGNLIALSLGLTPNFKSNFDLAEDAKLQLSKDTYDDDLDNLLAQIGDQYADLFLAAKNLSDAILLSDILRVNTEITKAPLSASMIKRYDEHHQDLTLLKALVRQQLPEKYKEIFFDQSKNGYAGYIDGGASQEEFYKFIKPILEKMDGTEELLVKLNREDLLRKQRTFDNGSIPHQIHLGELHAILRRQEDFYPFLKDNREKIEKILTFRIPYYVGPLARGNSRFAWMTRKSEETITPWNFEEVVDKGASAQSFIERMTNFDKNLPNEKVLPKHSLLYEYFTVYNELTKVKYVTEGMRKPAFLSGEQKKAIVDLLFKTNRKVTVKQLKEDYFKKIECFDSVEISGVEDRFNASLGTYHDLLKIIKDKDFLDNEENEDILEDIVLTLTLFEDREMIEERLKTYAHLFDDKVMKQLKRRRYTGWGRLSRKLINGIRDKQSGKTILDFLKSDGFANRNFMQLIHDDSLTFKEDIQKAQVSGQGDSLHEHIANLAGSPAIKKGILQTVKVVDELVKVMGRHKPENIVIEMARENQTTQKGQKNSRERMKRIEEGIKELGSQILKEHPVENTQLQNEKLYLYYLQNGRDMYVDQELDINRLSDYDVDHIVPQSFLKDDSIDNKVLTRSDKARGKSDNVPSEEVVKKMKNYWRQLLNAKLITQRKFDNLTKAERGGLSELDKAGFIKRQLVETRQITKHVAQILDSRMNTKYDENDKLIREVKVITLKSKLVSDFRKDFQFYKVREINNYHHAHDAYLNAVVGTALIKKYPKLESEFVYGDYKVYDVRKMIAKSEQEIGKATAKYFFYSNIMNFFKTEITLANGEIRKRPLIETNGETGEIVWDKGRDFATVRKVLSMPQVNIVKKTEVQTGGFSKESILPKRNSDKLIARKKDWDPKKYGGFDSPTVAYSVLVVAKVEKGKSKKLKSVKELLGITIMERSSFEKNPIDFLEAKGYKEVKKDLIIKLPKYSLFELENGRKRMLASAGELQKGNELALPSKYVNFLYLASHYEKLKGSPEDNEQKQLFVEQHKHYLDEIIEQISEFSKRVILADANLDKVLSAYNKHRDKPIREQAENIIHLFTLTNLGAPAAFKYFDTTIDRKRYTSTKEVLDATLIHQSITGLYETRIDLSQLGGDGGGSSEAAAKGGGGGTLNIEDEYRLHETSKEPDVPLGSTWLSDFPQAWAETGGMGLAVRQAPLIIPLKATSTPVSIKQYPMSQEARLGIKPHIQRLLDQGILVPCQSPWNTPLLPVKKPGTNDYRPVQDLREVNKRVEDIHPTVPNPYNLLSGLPPSHQWYTVLDLKDAFFCLRLHPTSQPLFAFEWRDPEMGISGQLTWTRLPQGFKNSPTLFNEALHRDLADFRIQHPDLILLQYVDDLLLAATSEQDCQRGTRALLQTLGNLGYRASAKKAQICQKQVKYLGYLLKEGQRWLTEARKETVMGQPTPKTPRQLREFLGTAGFCRLWIPGFAEMAAPLYPLTKPGTLFNWGPDQQKAYQEIKQALLTAPALGLPDLTKPFELFVDEKQGYAKGVLTQKLGPWRRPVAYLSKKLDPVAAGWPPCLRMVAAIAVLTKDAGKLTMGQPLVILAPHAVEALVKQPPDRWLSNARMTHYQAMLLDTDRVQFGPVVALNPATLLPLPEKEAPHDCLEILAETHGTRPDLTDQPIPDADYTWYTDGSSFLQEGQRRAGAAVTTETEVIWARALPAGTSAQRAELIALTQALKMAEGKKLNVYTDSRYAFATAHVHGEIYRRRGWLTSEGREIKNKNEILALLKALFLPKRLSIIHCPGHQKGNSAEARGNRMADQAAREAAMKAVLETSTLLAGKRTADGSEFEKRTADGSEFESPKKKAKVE

SEQ ID NO: 7317 - protein, 2096 aa, synthetic construct
MPAAKRVKLDGGDKKYSIGLDIGTNSVGWAVITDEYKVPSKKFKVLGNTDRHSIKKNLIGALLFDSGETAEATRLKRTARRRYTRRKNRICYLQEIFSNEMAKVDDSFFHRLEESFLVEEDKKHERHPIFGNIVDEVAYHEKYPTIYHLRKKLVDSTDKADLRLIYLALAHMIKFRGHFLIEGDLNPDNSDVDKLFIQLVQTYNQLFEENPINASGVDAKAILSARLSKSRRLENLIAQLPGEKKNGLFGNLIALSLGLTPNFKSNFDLAEDAKLQLSKDTYDDDLDNLLAQIGDQYADLFLAAKNLSDAILLSDILRVNTEITKAPLSASMIKRYDEHHQDLTLLKALVRQQLPEKYKEIFFDQSKNGYAGYIDGGASQEEFYKFIKPILEKMDGTEELLVKLNREDLLRKQRTFDNGSIPHQIHLGELHAILRRQEDFYPFLKDNREKIEKILTFRIPYYVGPLARGNSRFAWMTRKSEETITPWNFEEVVDKGASAQSFIERMTNFDKNLPNEKVLPKHSLLYEYFTVYNELTKVKYVTEGMRKPAFLSGEQKKAIVDLLFKTNRKVTVKQLKEDYFKKIECFDSVEISGVEDRFNASLGTYHDLLKIIKDKDFLDNEENEDILEDIVLTLTLFEDREMIEERLKTYAHLFDDKVMKQLKRRRYTGWGRLSRKLINGIRDKQSGKTILDFLKSDGFANRNFMQLIHDDSLTFKEDIQKAQVSGQGDSLHEHIANLAGSPAIKKGILQTVKVVDELVKVMGRHKPENIVIEMARENQTTQKGQKNSRERMKRIEEGIKELGSQILKEHPVENTQLQNEKLYLYYLQNGRDMYVDQELDINRLSDYDVDHIVPQSFLKDDSIDNKVLTRSDKARGKSDNVPSEEVVKKMKNYWRQLLNAKLITQRKFDNLTKAERGGLSELDKAGFIKRQLVETRQITKHVAQILDSRMNTKYDENDKLIREVKVITLKSKLVSDFRKDFQFYKVREINNYHHAHDAYLNAVVGTALIKKYPKLESEFVYGDYKVYDVRKMIAKSEQEIGKATAKYFFYSNIMNFFKTEITLANGEIRKRPLIETNGETGEIVWDKGRDFATVRKVLSMPQVNIVKKTEVQTGGFSKESILPKRNSDKLIARKKDWDPKKYGGFDSPTVAYSVLVVAKVEKGKSKKLKSVKELLGITIMERSSFEKNPIDFLEAKGYKEVKKDLIIKLPKYSLFELENGRKRMLASAGELQKGNELALPSKYVNFLYLASHYEKLKGSPEDNEQKQLFVEQHKHYLDEIIEQISEFSKRVILADANLDKVLSAYNKHRDKPIREQAENIIHLFTLTNLGAPAAFKYFDTTIDRKRYTSTKEVLDATLIHQSITGLYETRIDLSQLGGDGGGSSEAAAKGGGGGTLNIEDEYRLHETSKEPDVPLGSTWLSDFPQAWAETGGMGLAVRQAPLIIPLKATSTPVSIKQYPMSQEARLGIKPHIQRLLDQGILVPCQSPWNTPLLPVKKPGTNDYRPVQDLREVNKRVEDIHPTVPNPYNLLSGLPPSHQWYTVLDLKDAFFCLRLHPTSQPLFAFEWRDPEMGISGQLTWTRLPQGFKNSPTLFNEALHRDLADFRIQHPDLILLQYVDDLLLAATSEQDCQRGTRALLQTLGNLGYRASAKKAQICQKQVKYLGYLLKEGQRWLTEARKETVMGQPTPKTPRQLREFLGKAGFCRLFIPGFAEMAAPLYPLTKPGTLFNWGPDQQKAYQEIKQALLTAPALGLPDLTKPFELFVDEKQGYAKGVLTQKLGPWRRPVAYLSKKLDPVAAGWPPCLRMVAAIAVLTKDAGKLTMGQPLVILAPHAVEALVKQPPDRWLSNARMTHYQAMLLDTDRVQFGPVVALNPATLLPLPEKEAPHDCLEILAETHGTRPDLTDQPIPDADYTWYTDGSSFLQEGQRRAGAAVTTETEVIWARALPAGTSAQRAELIALTQALKMAEGKKLNVYTDSRYAFATAHVHGEIYRRRGWLTSEGREIKNKNEILALLKALFLPKRLSIIHCPGHQKGNSAEARGNRMADQAAREAAMKAVLETSTLLAGKRTADGSEFEKRTADGSEFESPKKKAKVE

SEQ ID NO: 7318 - protein, 2098 aa, synthetic construct
MPAAKRVKLDGGDKKYSIGLDIGTNSVGWAVITDEYKVPSKKFKVLGNTDRHSIKKNLIGALLFDSGETAEATRLKRTARRRYTRRKNRICYLQEIFSNEMAKVDDSFFHRLEESFLVEEDKKHERHPIFGNIVDEVAYHEKYPTIYHLRKKLVDSTDKADLRLIYLALAHMIKFRGHFLIEGDLNPDNSDVDKLFIQLVQTYNQLFEENPINASGVDAKAILSARLSKSRRLENLIAQLPGEKKNGLFGNLIALSLGLTPNFKSNFDLAEDAKLQLSKDTYDDDLDNLLAQIGDQYADLFLAAKNLSDAILLSDILRVNTEITKAPLSASMIKRYDEHHQDLTLLKALVRQQLPEKYKEIFFDQSKNGYAGYIDGGASQEEFYKFIKPILEKMDGTEELLVKLNREDLLRKQRTFDNGSIPHQIHLGELHAILRRQEDFYPFLKDNREKIEKILTFRIPYYVGPLARGNSRFAWMTRKSEETITPWNFEEVVDKGASAQSFIERMTNFDKNLPNEKVLPKHSLLYEYFTVYNELTKVKYVTEGMRKPAFLSGEQKKAIVDLLFKTNRKVTVKQLKEDYFKKIECFDSVEISGVEDRFNASLGTYHDLLKIIKDKDFLDNEENEDILEDIVLTLTLFEDREMIEERLKTYAHLFDDKVMKQLKRRRYTGWGRLSRKLINGIRDKQSGKTILDFLKSDGFANRNFMQLIHDDSLTFKEDIQKAQVSGQGDSLHEHIANLAGSPAIKKGILQTVKVVDELVKVMGRHKPENIVIEMARENQTTQKGQKNSRERMKRIEEGIKELGSQILKEHPVENTQLQNEKLYLYYLQNGRDMYVDQELDINRLSDYDVDHIVPQSFLKDDSIDNKVLTRSDKARGKSDNVPSEEVVKKMKNYWRQLLNAKLITQRKFDNLTKAERGGLSELDKAGFIKRQLVETRQITKHVAQILDSRMNTKYDENDKLIREVKVITLKSKLVSDFRKDFQFYKVREINNYHHAHDAYLNAVVGTALIKKYPKLESEFVYGDYKVYDVRKMIAKSEQEIGKATAKYFFYSNIMNFFKTEITLANGEIRKRPLIETNGETGEIVWDKGRDFATVRKVLSMPQVNIVKKTEVQTGGFSKESILPKRNSDKLIARKKDWDPKKYGGFDSPTVAYSVLVVAKVEKGKSKKLKSVKELLGITIMERSSFEKNPIDFLEAKGYKEVKKDLIIKLPKYSLFELENGRKRMLASAGELQKGNELALPSKYVNFLYLASHYEKLKGSPEDNEQKQLFVEQHKHYLDEIIEQISEFSKRVILADANLDKVLSAYNKHRDKPIREQAENIIHLFTLTNLGAPAAFKYFDTTIDRKRYTSTKEVLDATLIHQSITGLYETRIDLSQLGGDGGEAAAKGGGGSSGGTAPLEEEYRLFLEAPIQNVTLLEQWKREIPKVWAEINPPGLASTQAPIHVQLLSTALPVRVRQYPITLEAKRSLRETIRKFRAAGILRPVHSPWNTPLLPVRKSGTSEYRMVQDLREVNKRVETIHPTVPNPYTLLSLLPPDRIWYSVLDLKDAFFCIPLAPESQLIFAFEWADAEEGESGQLTWTRLPQGFKNSPTLFDEALNRDLQGFRLDHPSVSLLQYVDDLLIAADTQAACLSATRDLLMTLAELGYRVSGKKAQLCQEEVTYLGFKIHKGSRSLSNSRTQAILQIPVPKTKRQVREFLGTIGYCRLWIPGFAELAQPLYAATRGGNDPLVWGEKEEEAFQSLKLALTQPPALALPSLDKPFQLFVEETSGAAKGVLTQALGPWKRPVAYLSKRLDPVAAGWPRCLRAIAAAALLTREASKLTFGQDIEITSSHNLESLLRSPPDKWLTNARITQYQVLLLDPPRVRFKQTAALNPATLLPETDDTLPIHHCLDTLDSLTSTRPDLTDQPLAQAEATLFTDGSSYIRDGKRYAGAAVVTLDSVIWAEPLPIGTSAQKAELIALTKALEWSKDKSVNIYTDSRYAFATLHVHGMIYRERGLLTAGGKAIKNAPEILALLTAVWLPKRVAVMHCKGHQKDDAPTSTGNRRADEVAREVAIRPLSTQATISAGKRTADGSEFEKRTADGSEFESPKKKAKVE

SEQ ID NO: 7319 - protein, 2098 aa, synthetic construct
MPAAKRVKLDGGDKKYSIGLDIGTNSVGWAVITDEYKVPSKKFKVLGNTDRHSIKKNLIGALLFDSGETAEATRLKRTARRRYTRRKNRICYLQEIFSNEMAKVDDSFFHRLEESFLVEEDKKHERHPIFGNIVDEVAYHEKYPTIYHLRKKLVDSTDKADLRLIYLALAHMIKFRGHFLIEGDLNPDNSDVDKLFIQLVQTYNQLFEENPINASGVDAKAILSARLSKSRRLENLIAQLPGEKKNGLFGNLIALSLGLTPNFKSNFDLAEDAKLQLSKDTYDDDLDNLLAQIGDQYADLFLAAKNLSDAILLSDILRVNTEITKAPLSASMIKRYDEHHQDLTLLKALVRQQLPEKYKEIFFDQSKNGYAGYIDGGASQEEFYKFIKPILEKMDGTEELLVKLNREDLLRKQRTFDNGSIPHQIHLGELHAILRRQEDFYPFLKDNREKIEKILTFRIPYYVGPLARGNSRFAWMTRKSEETITPWNFEEVVDKGASAQSFIERMTNFDKNLPNEKVLPKHSLLYEYFTVYNELTKVKYVTEGMRKPAFLSGEQKKAIVDLLFKTNRKVTVKQLKEDYFKKIECFDSVEISGVEDRFNASLGTYHDLLKIIKDKDFLDNEENEDILEDIVLTLTLFEDREMIEERLKTYAHLFDDKVMKQLKRRRYTGWGRLSRKLINGIRDKQSGKTILDFLKSDGFANRNFMQLIHDDSLTFKEDIQKAQVSGQGDSLHEHIANLAGSPAIKKGILQTVKVVDELVKVMGRHKPENIVIEMARENQTTQKGQKNSRERMKRIEEGIKELGSQILKEHPVENTQLQNEKLYLYYLQNGRDMYVDQELDINRLSDYDVDHIVPQSFLKDDSIDNKVLTRSDKARGKSDNVPSEEVVKKMKNYWRQLLNAKLITQRKFDNLTKAERGGLSELDKAGFIKRQLVETRQITKHVAQILDSRMNTKYDENDKLIREVKVITLKSKLVSDFRKDFQFYKVREINNYHHAHDAYLNAVVGTALIKKYPKLESEFVYGDYKVYDVRKMIAKSEQEIGKATAKYFFYSNIMNFFKTEITLANGEIRKRPLIETNGETGEIVWDKGRDFATVRKVLSMPQVNIVKKTEVQTGGFSKESILPKRNSDKLIARKKDWDPKKYGGFDSPTVAYSVLVVAKVEKGKSKKLKSVKELLGITIMERSSFEKNPIDFLEAKGYKEVKKDLIIKLPKYSLFELENGRKRMLASAGELQKGNELALPSKYVNFLYLASHYEKLKGSPEDNEQKQLFVEQHKHYLDEIIEQISEFSKRVILADANLDKVLSAYNKHRDKPIREQAENIIHLFTLTNLGAPAAFKYFDTTIDRKRYTSTKEVLDATLIHQSITGLYETRIDLSQLGGDGGEAAAKGGGGSSGGTAPLEEEYRLFLEAPIQNVTLLEQWKREIPKVWAEINPPGLASTQAPIHVQLLSTALPVRVRQYPITLEAKRSLRETIRKFRAAGILRPVHSPWNTPLLPVRKSGTSEYRMVQDLREVNKRVETIHPTVPNPYTLLSLLPPDRIWYSVLDLKDAFFCIPLAPESQLIFAFEWADAEEGESGQLTWTRLPQGFKNSPTLFNEALNRDLQGFRLDHPSVSLLQYVDDLLIAADTQAACLSATRDLLMTLAELGYRVSGKKAQLCQEEVTYLGFKIHKGSRSLSNSRTQAILQIPVPKTKRQVREFLGTIGYCRLWIPGFAELAQPLYAATRPGNDPLVWGEKEEEAFQSLKLALTQPPALALPSLDKPFQLFVEETSGAAKGVLTQALGPWKRPVAYLSKRLDPVAAGWPRCLRAIAAAALLTREASKLTFGQDIEITSSHNLESLLRSPPDKWLTNARITQYQVLLLDPPRVRFKQTAALNPATLLPETDDTLPIHHCLDTLDSLTSTRPDLTDQPLAQAEATLFTDGSSYIRDGKRYAGAAVVTLDSVIWAEPLPIGTSAQKAELIALTKALEWSKDKSVNIYTDSRYAFATLHVHGMIYRERGWLTAGGKAIKNAPEILALLTAVWLPKRVAVMHCKGHQKDDAPTSTGNRRADEVAREVAIRPLSTQATISAGKRTADGSEFEKRTADGSEFESPKKKAKVE

SEQ ID NO: 7320 - protein, 2098 aa, synthetic construct
MPAAKRVKLDGGDKKYSIGLDIGTNSVGWAVITDEYKVPSKKFKVLGNTDRHSIKKNLIGALLFDSGETAEATRLKRTARRRYTRRKNRICYLQEIFSNEMAKVDDSFFHRLEESFLVEEDKKHERHPIFGNIVDEVAYHEKYPTIYHLRKKLVDSTDKADLRLIYLALAHMIKFRGHFLIEGDLNPDNSDVDKLFIQLVQTYNQLFEENPINASGVDAKAILSARLSKSRRLENLIAQLPGEKKNGLFGNLIALSLGLTPNFKSNFDLAEDAKLQLSKDTYDDDLDNLLAQIGDQYADLFLAAKNLSDAILLSDILRVNTEITKAPLSASMIKRYDEHHQDLTLLKALVRQQLPEKYKEIFFDQSKNGYAGYIDGGASQEEFYKFIKPILEKMDGTEELLVKLNREDLLRKQRTFDNGSIPHQIHLGELHAILRRQEDFYPFLKDNREKIEKILTFRIPYYVGPLARGNSRFAWMTRKSEETITPWNFEEVVDKGASAQSFIERMTNFDKNLPNEKVLPKHSLLYEYFTVYNELTKVKYVTEGMRKPAFLSGEQKKAIVDLLFKTNRKVTVKQLKEDYFKKIECFDSVEISGVEDRFNASLGTYHDLLKIIKDKDFLDNEENEDILEDIVLTLTLFEDREMIEERLKTYAHLFDDKVMKQLKRRRYTGWGRLSRKLINGIRDKQSGKTILDFLKSDGFANRNFMQLIHDDSLTFKEDIQKAQVSGQGDSLHEHIANLAGSPAIKKGILQTVKVVDELVKVMGRHKPENIVIEMARENQTTQKGQKNSRERMKRIEEGIKELGSQILKEHPVENTQLQNEKLYLYYLQNGRDMYVDQELDINRLSDYDVDHIVPQSFLKDDSIDNKVLTRSDKARGKSDNVPSEEVVKKMKNYWRQLLNAKLITQRKFDNLTKAERGGLSELDKAGFIKRQLVETRQITKHVAQILDSRMNTKYDENDKLIREVKVITLKSKLVSDFRKDFQFYKVREINNYHHAHDAYLNAVVGTALIKKYPKLESEFVYGDYKVYDVRKMIAKSEQEIGKATAKYFFYSNIMNFFKTEITLANGEIRKRPLIETNGETGEIVWDKGRDFATVRKVLSMPQVNIVKKTEVQTGGFSKESILPKRNSDKLIARKKDWDPKKYGGFDSPTVAYSVLVVAKVEKGKSKKLKSVKELLGITIMERSSFEKNPIDFLEAKGYKEVKKDLIIKLPKYSLFELENGRKRMLASAGELQKGNELALPSKYVNFLYLASHYEKLKGSPEDNEQKQLFVEQHKHYLDEIIEQISEFSKRVILADANLDKVLSAYNKHRDKPIREQAENIIHLFTLTNLGAPAAFKYFDTTIDRKRYTSTKEVLDATLIHQSITGLYETRIDLSQLGGDGGEAAAKGGGGSSGGTAPLEEEYRLFLEAPIQNVTLLEQWKREIPKVWAEINPPGLASTQAPIHVQLLSTALPVRVRQYPITLEAKRSLRETIRKFRAAGILRPVHSPWNTPLLPVRKSGTSEYRMVQDLREVNKRVETIHPTVPNPYTLLSLLPPDRIWYSVLDLKDAFFCIPLAPESQLIFAFEWADAEEGESGQLTWTRLPQGFKNSPTLFNEALNRDLQGFRLDHPSVSLLQYVDDLLIAADTQAACLSATRDLLMTLAELGYRVSGKKAQLCQEEVTYLGFKIHKGSRSLSNSRTQAILQIPVPKTKRQVREFLGKIGYCRLFIPGFAELAQPLYAATRPGNDPLVWGEKEEEAFQSLKLALTQPPALALPSLDKPFQLFVEETSGAAKGVLTQALGPWKRPVAYLSKRLDPVAAGWPRCLRAIAAAALLTREASKLTFGQDIEITSSHNLESLLRSPPDKWLTNARITQYQVLLLDPPRVRFKQTAALNPATLLPETDDTLPIHHCLDTLDSLTSTRPDLTDQPLAQAEATLFTDGSSYIRDGKRYAGAAVVTLDSVIWAEPLPIGTSAQKAELIALTKALEWSKDKSVNIYTDSRYAFATLHVHGMIYRERGWLTAGGKAIKNAPEILALLTAVWLPKRVAVMHCKGHQKDDAPTSTGNRRADEVAREVAIRPLSTQATISAGKRTADGSEFEKRTADGSEFESPKKKAKVE

SEQ ID NO: 7321 - protein, 2102 aa, synthetic construct
MPAAKRVKLDGGDKKYSIGLDIGTNSVGWAVITDEYKVPSKKFKVLGNTDRHSIKKNLIGALLFDSGETAEATRLKRTARRRYTRRKNRICYLQEIFSNEMAKVDDSFFHRLEESFLVEEDKKHERHPIFGNIVDEVAYHEKYPTIYHLRKKLVDSTDKADLRLIYLALAHMIKFRGHFLIEGDLNPDNSDVDKLFIQLVQTYNQLFEENPINASGVDAKAILSARLSKSRRLENLIAQLPGEKKNGLFGNLIALSLGLTPNFKSNFDLAEDAKLQLSKDTYDDDLDNLLAQIGDQYADLFLAAKNLSDAILLSDILRVNTEITKAPLSASMIKRYDEHHQDLTLLKALVRQQLPEKYKEIFFDQSKNGYAGYIDGGASQEEFYKFIKPILEKMDGTEELLVKLNREDLLRKQRTFDNGSIPHQIHLGELHAILRRQEDFYPFLKDNREKIEKILTFRIPYYVGPLARGNSRFAWMTRKSEETITPWNFEEVVDKGASAQSFIERMTNFDKNLPNEKVLPKHSLLYEYFTVYNELTKVKYVTEGMRKPAFLSGEQKKAIVDLLFKTNRKVTVKQLKEDYFKKIECFDSVEISGVEDRFNASLGTYHDLLKIIKDKDFLDNEENEDILEDIVLTLTLFEDREMIEERLKTYAHLFDDKVMKQLKRRRYTGWGRLSRKLINGIRDKQSGKTILDFLKSDGFANRNFMQLIHDDSLTFKEDIQKAQVSGQGDSLHEHIANLAGSPAIKKGILQTVKVVDELVKVMGRHKPENIVIEMARENQTTQKGQKNSRERMKRIEEGIKELGSQILKEHPVENTQLQNEKLYLYYLQNGRDMYVDQELDINRLSDYDVDHIVPQSFLKDDSIDNKVLTRSDKARGKSDNVPSEEVVKKMKNYWRQLLNAKLITQRKFDNLTKAERGGLSELDKAGFIKRQLVETRQITKHVAQILDSRMNTKYDENDKLIREVKVITLKSKLVSDFRKDFQFYKVREINNYHHAHDAYLNAVVGTALIKKYPKLESEFVYGDYKVYDVRKMIAKSEQEIGKATAKYFFYSNIMNFFKTEITLANGEIRKRPLIETNGETGEIVWDKGRDFATVRKVLSMPQVNIVKKTEVQTGGFSKESILPKRNSDKLIARKKDWDPKKYGGFDSPTVAYSVLVVAKVEKGKSKKLKSVKELLGITIMERSSFEKNPIDFLEAKGYKEVKKDLIIKLPKYSLFELENGRKRMLASAGELQKGNELALPSKYVNFLYLASHYEKLKGSPEDNEQKQLFVEQHKHYLDEIIEQISEFSKRVILADANLDKVLSAYNKHRDKPIREQAENIIHLFTLTNLGAPAAFKYFDTTIDRKRYTSTKEVLDATLIHQSITGLYETRIDLSQLGGDGGEAAAKGGGGSSGGTVSLQDEHRLFDIPVTTSLPDVWLQDFPQAWAETGGLGRAKCQAPIIIDLKPTAVPVSIKQYPMSLEAHMGIRQHIIKFLELGVLRPCRSPWNTPLLPVKKPGTQDYRPVQDLREINKRTVDIHPTVPNPYNLLSTLKPDYSWYTVLDLKDAFFCLPLAPQSQELFAFEWKDPERGISGQLTWTRLPQGFKNSPTLFDEALHRDLTDFRTQHPEVTLLQYVDDLLLAAPTKKACTQGTRHLLQELGEKGYRASAKKAQICQTKVTYLGYILSEGKRWLTPGRIETVARIPPPRNPREVREFLGTAGFCRLWIPGFAELAAPLYALTKESTPFTWQTEHQLAFEALKKALLSAPALGLPDTSKPFTLFLDERQGIAKGVLTQKLGPWKRPVAYLSKKLDPVAAGWPPCLRIMAATAMLVKDSAKLTLGQPLTVITPHTLEAIVRQPPDRWITNARLTHYQALLLDTDRVQFGPPVTLNPATLLPVPENQPSPHDCRQVLAETHGTREDLKDQELPDADHTWYTDGSSYLDSGTRRAGAAVVDGHNTIWAQSLPPGTSAQKAELIALTKALELSKGKKANIYTDSRYAFATAHTHGSIYERRGLLTSEGKEIKNKAEIIALLKALFLPQEVAIIHCPGHQKGQDPVAVGNRQADRVARQAAMAEVLTLATEPDNTSHITAGKRTADGSEFEKRTADGSEFESPKKKAKVE

SEQ ID NO: 7322 - protein, 2087 aa, synthetic construct
MPAAKRVKLDGGDKKYSIGLDIGTNSVGWAVITDEYKVPSKKFKVLGNTDRHSIKKNLIGALLFDSGETAEATRLKRTARRRYTRRKNRICYLQEIFSNEMAKVDDSFFHRLEESFLVEEDKKHERHPIFGNIVDEVAYHEKYPTIYHLRKKLVDSTDKADLRLIYLALAHMIKFRGHFLIEGDLNPDNSDVDKLFIQLVQTYNQLFEENPINASGVDAKAILSARLSKSRRLENLIAQLPGEKKNGLFGNLIALSLGLTPNFKSNFDLAEDAKLQLSKDTYDDDLDNLLAQIGDQYADLFLAAKNLSDAILLSDILRVNTEITKAPLSASMIKRYDEHHQDLTLLKALVRQQLPEKYKEIFFDQSKNGYAGYIDGGASQEEFYKFIKPILEKMDGTEELLVKLNREDLLRKQRTFDNGSIPHQIHLGELHAILRRQEDFYPFLKDNREKIEKILTFRIPYYVGPLARGNSRFAWMTRKSEETITPWNFEEVVDKGASAQSFIERMTNFDKNLPNEKVLPKHSLLYEYFTVYNELTKVKYVTEGMRKPAFLSGEQKKAIVDLLFKTNRKVTVKQLKEDYFKKIECFDSVEISGVEDRFNASLGTYHDLLKIIKDKDFLDNEENEDILEDIVLTLTLFEDREMIEERLKTYAHLFDDKVMKQLKRRRYTGWGRLSRKLINGIRDKQSGKTILDFLKSDGFANRNFMQLIHDDSLTFKEDIQKAQVSGQGDSLHEHIANLAGSPAIKKGILQTVKVVDELVKVMGRHKPENIVIEMARENQTTQKGQKNSRERMKRIEEGIKELGSQILKEHPVENTQLQNEKLYLYYLQNGRDMYVDQELDINRLSDYDVDHIVPQSFLKDDSIDNKVLTRSDKARGKSDNVPSEEVVKKMKNYWRQLLNAKLITQRKFDNLTKAERGGLSELDKAGFIKRQLVETRQITKHVAQILDSRMNTKYDENDKLIREVKVITLKSKLVSDFRKDFQFYKVREINNYHHAHDAYLNAVVGTALIKKYPKLESEFVYGDYKVYDVRKMIAKSEQEIGKATAKYFFYSNIMNFFKTEITLANGEIRKRPLIETNGETGEIVWDKGRDFATVRKVLSMPQVNIVKKTEVQTGGFSKESILPKRNSDKLIARKKDWDPKKYGGFDSPTVAYSVLVVAKVEKGKSKKLKSVKELLGITIMERSSFEKNPIDFLEAKGYKEVKKDLIIKLPKYSLFELENGRKRMLASAGELQKGNELALPSKYVNFLYLASHYEKLKGSPEDNEQKQLFVEQHKHYLDEIIEQISEFSKRVILADANLDKVLSAYNKHRDKPIREQAENIIHLFTLTNLGAPAAFKYFDTTIDRKRYTSTKEVLDATLIHQSITGLYETRIDLSQLGGDGGEAAAKGGGGSSGGVPWILKKPLELTIKLDLEEQQGTLLNNSILSKKGKEELKQLFEKYSALWQSWENQVGHRRIRPHKIATGTVKPTPQKQYHINPKAKPDIQIVINDLLKQGVLIQKESTMNTPVYPVPKPNGRWRMVLDYRAVNKVTPLIAVQNQHSYGILGSLFKGRYKTTIDLSNGFWAHPIVPEDYWITAFTWQGKQYCWTVLPQGFLNSPGLFTGDVVDLLQGIPNVEVYVDDVYISHDSEKEHLEYLDILFNRLKEAGYIISLKKSNIANSIVDFLGFQITNEGRGLTDTFKEKLENITAPTTLKQLQSILGLLNFARNFIPDFTELIAPLYALIPKSTKNYVPWQIEHSTTLETLITKLNGAEYLQGRKGDKTLIMKVNASYTTGYIRYYNEGEKKPISYVSIVFSKTELKFTELEKLLTTVHKGLLKALDLSMGQNIHVYSPIVSMQNIQKTPQTAKKALASRWLSWLSYLEDPRIRFFYDPQMPALKDLPAVDTGKDNKKHPSNFQHIFYTDGSAITSPTKEGHLNAGMGIVYFINKDGNLQKQQEWSISLGNHTAQFAEIAAFEFALKKCLPLGGNILVVTDSNYVAKAYNEELDVWASNGFVNNRKKPLKHISKWKSVADLKRLRPDVVVTHEPGHQKLDSSPHAYGNNLADQLATQASFKVHAGKRTADGSEFEKRTADGSEFESPKKKAKVE

SEQ ID NO: 7323 - protein, 2095 aa, synthetic construct
MPAAKRVKLDGGDKKYSIGLDIGTNSVGWAVITDEYKVPSKKFKVLGNTDRHSIKKNLIGALLFDSGETAEATRLKRTARRRYTRRKNRICYLQEIFSNEMAKVDDSFFHRLEESFLVEEDKKHERHPIFGNIVDEVAYHEKYPTIYHLRKKLVDSTDKADLRLIYLALAHMIKFRGHFLIEGDLNPDNSDVDKLFIQLVQTYNQLFEENPINASGVDAKAILSARLSKSRRLENLIAQLPGEKKNGLFGNLIALSLGLTPNFKSNFDLAEDAKLQLSKDTYDDDLDNLLAQIGDQYADLFLAAKNLSDAILLSDILRVNTEITKAPLSASMIKRYDEHHQDLTLLKALVRQQLPEKYKEIFFDQSKNGYAGYIDGGASQEEFYKFIKPILEKMDGTEELLVKLNREDLLRKQRTFDNGSIPHQIHLGELHAILRRQEDFYPFLKDNREKIEKILTFRIPYYVGPLARGNSRFAWMTRKSEETITPWNFEEVVDKGASAQSFIERMTNFDKNLPNEKVLPKHSLLYEYFTVYNELTKVKYVTEGMRKPAFLSGEQKKAIVDLLFKTNRKVTVKQLKEDYFKKIECFDSVEISGVEDRFNASLGTYHDLLKIIKDKDFLDNEENEDILEDIVLTLTLFEDREMIEERLKTYAHLFDDKVMKQLKRRRYTGWGRLSRKLINGIRDKQSGKTILDFLKSDGFANRNFMQLIHDDSLTFKEDIQKAQVSGQGDSLHEHIANLAGSPAIKKGILQTVKVVDELVKVMGRHKPENIVIEMARENQTTQKGQKNSRERMKRIEEGIKELGSQILKEHPVENTQLQNEKLYLYYLQNGRDMYVDQELDINRLSDYDVDHIVPQSFLKDDSIDNKVLTRSDKARGKSDNVPSEEVVKKMKNYWRQLLNAKLITQRKFDNLTKAERGGLSELDKAGFIKRQLVETRQITKHVAQILDSRMNTKYDENDKLIREVKVITLKSKLVSDFRKDFQFYKVREINNYHHAHDAYLNAVVGTALIKKYPKLESEFVYGDYKVYDVRKMIAKSEQEIGKATAKYFFYSNIMNFFKTEITLANGEIRKRPLIETNGETGEIVWDKGRDFATVRKVLSMPQVNIVKKTEVQTGGFSKESILPKRNSDKLIARKKDWDPKKYGGFDSPTVAYSVLVVAKVEKGKSKKLKSVKELLGITIMERSSFEKNPIDFLEAKGYKEVKKDLIIKLPKYSLFELENGRKRMLASAGELQKGNELALPSKYVNFLYLASHYEKLKGSPEDNEQKQLFVEQHKHYLDEIIEQISEFSKRVILADANLDKVLSAYNKHRDKPIREQAENIIHLFTLTNLGAPAAFKYFDTTIDRKRYTSTKEVLDATLIHQSITGLYETRIDLSQLGGDGGEAAAKGGGGSSGGTLQLEEEYRLFEPESTQKQEMDIWLKNFPQAWAETGGMGTAHCQAPVLIQLKATATPISIRQYPMPHEAYQGIKPHIRRMLDQGILKPCQSPWNTPLLPVKKPGTEDYRPVQDLREVNKRVEDIHPTVPNPYNLLSTLPPSHPWYTVLDLKDAFFCLRLHSESQLLFAFEWRDPEIGLSGQLTWTRLPQGFKNSPTLFNEALHSDLADFRVRYPALVLLQYVDDLLLAAATRTECLEGTKALLETLGNKGYRASAKKAQICLQEVTYLGYSLKDGQRWLTKARKEAILSIPVPKNSRQVREFLGTAGYCRLWIPGFAELAAPLYPLTRPGTLFQWGTEQQLAFEDIKKALLSSPALGLPDITKPFELFIDENSGFAKGVLVQKLGPWKRPVAYLSKKLDTVASGWPPCLRMVAAIAILVKDAGKLTLGQPLTILTSHPVEALVRQPPNKWLSNARMTHYQAMLLDAERVHFGPTVSLNPATLLPLPSGGNHHDCLQILAETHGTRPDLTDQPLPDADLTWYTDGSSFIRNGEREAGAAVTTESEVIWAAPLPPGTSAQRAELIALTQALKMAEGKKLTVYTDSRYAFATTHVHGEIYRRRGWLTSEGKEIKNKNEILALLEALFLPKRLSIIHCPGHQKGDSPQAKGNRLADDTAKKAATETHSSLTVLPAGKRTADGSEFEKRTADGSEFESPKKKAKVE

SEQ ID NO: 7324 - protein, 2095 aa, synthetic construct
MPAAKRVKLDGGDKKYSIGLDIGTNSVGWAVITDEYKVPSKKFKVLGNTDRHSIKKNLIGALLFDSGETAEATRLKRTARRRYTRRKNRICYLQEIFSNEMAKVDDSFFHRLEESFLVEEDKKHERHPIFGNIVDEVAYHEKYPTIYHLRKKLVDSTDKADLRLIYLALAHMIKFRGHFLIEGDLNPDNSDVDKLFIQLVQTYNQLFEENPINASGVDAKAILSARLSKSRRLENLIAQLPGEKKNGLFGNLIALSLGLTPNFKSNFDLAEDAKLQLSKDTYDDDLDNLLAQIGDQYADLFLAAKNLSDAILLSDILRVNTEITKAPLSASMIKRYDEHHQDLTLLKALVRQQLPEKYKEIFFDQSKNGYAGYIDGGASQEEFYKFIKPILEKMDGTEELLVKLNREDLLRKQRTFDNGSIPHQIHLGELHAILRRQEDFYPFLKDNREKIEKILTFRIPYYVGPLARGNSRFAWMTRKSEETITPWNFEEVVDKGASAQSFIERMTNFDKNLPNEKVLPKHSLLYEYFTVYNELTKVKYVTEGMRKPAFLSGEQKKAIVDLLFKTNRKVTVKQLKEDYFKKIECFDSVEISGVEDRFNASLGTYHDLLKIIKDKDFLDNEENEDILEDIVLTLTLFEDREMIEERLKTYAHLFDDKVMKQLKRRRYTGWGRLSRKLINGIRDKQSGKTILDFLKSDGFANRNFMQLIHDDSLTFKEDIQKAQVSGQGDSLHEHIANLAGSPAIKKGILQTVKVVDELVKVMGRHKPENIVIEMARENQTTQKGQKNSRERMKRIEEGIKELGSQILKEHPVENTQLQNEKLYLYYLQNGRDMYVDQELDINRLSDYDVDHIVPQSFLKDDSIDNKVLTRSDKARGKSDNVPSEEVVKKMKNYWRQLLNAKLITQRKFDNLTKAERGGLSELDKAGFIKRQLVETRQITKHVAQILDSRMNTKYDENDKLIREVKVITLKSKLVSDFRKDFQFYKVREINNYHHAHDAYLNAVVGTALIKKYPKLESEFVYGDYKVYDVRKMIAKSEQEIGKATAKYFFYSNIMNFFKTEITLANGEIRKRPLIETNGETGEIVWDKGRDFATVRKVLSMPQVNIVKKTEVQTGGFSKESILPKRNSDKLIARKKDWDPKKYGGFDSPTVAYSVLVVAKVEKGKSKKLKSVKELLGITIMERSSFEKNPIDFLEAKGYKEVKKDLIIKLPKYSLFELENGRKRMLASAGELQKGNELALPSKYVNFLYLASHYEKLKGSPEDNEQKQLFVEQHKHYLDEIIEQISEFSKRVILADANLDKVLSAYNKHRDKPIREQAENIIHLFTLTNLGAPAAFKYFDTTIDRKRYTSTKEVLDATLIHQSITGLYETRIDLSQLGGDGGEAAAKGGGGSSGGTLQLEEEYRLFEPESTQKQEMDIWLKNFPQAWAETGGMGTAHCQAPVLIQLKATATPISIRQYPMPHEAYQGIKPHIRRMLDQGILKPCQSPWNTPLLPVKKPGTEDYRPVQDLREVNKRVEDIHPTVPNPYNLLSTLPPSHPWYTVLDLKDAFFCLRLHSESQLLFAFEWRDPEIGLSGQLTWTRLPQGFKNSPTLFNEALHSDLADFRVRYPALVLLQYVDDLLLAAATRTECLEGTKALLETLGNKGYRASAKKAQICLQEVTYLGYSLKDGQRWLTKARKEAILSIPVPKNSRQVREFLGKAGYCRLFIPGFAELAAPLYPLTRPGTLFQWGTEQQLAFEDIKKALLSSPALGLPDITKPFELFIDENSGFAKGVLVQKLGPWKRPVAYLSKKLDTVASGWPPCLRMVAAIAILVKDAGKLTLGQPLTILTSHPVEALVRQPPNKWLSNARMTHYQAMLLDAERVHFGPTVSLNPATLLPLPSGGNHHDCLQILAETHGTRPDLTDQPLPDADLTWYTDGSSFIRNGEREAGAAVTTESEVIWAAPLPPGTSAQRAELIALTQALKMAEGKKLTVYTDSRYAFATTHVHGEIYRRRGWLTSEGKEIKNKNEILALLEALFLPKRLSIIHCPGHQKGDSPQAKGNRLADDTAKKAATETHSSLTVLPAGKRTADGSEFEKRTADGSEFESPKKKAKVE

SEQ ID NO: 7325 - protein, 2176 aa, synthetic construct
MPAAKRVKLDGGDKKYSIGLDIGTNSVGWAVITDEYKVPSKKFKVLGNTDRHSIKKNLIGALLFDSGETAEATRLKRTARRRYTRRKNRICYLQEIFSNEMAKVDDSFFHRLEESFLVEEDKKHERHPIFGNIVDEVAYHEKYPTIYHLRKKLVDSTDKADLRLIYLALAHMIKFRGHFLIEGDLNPDNSDVDKLFIQLVQTYNQLFEENPINASGVDAKAILSARLSKSRRLENLIAQLPGEKKNGLFGNLIALSLGLTPNFKSNFDLAEDAKLQLSKDTYDDDLDNLLAQIGDQYADLFLAAKNLSDAILLSDILRVNTEITKAPLSASMIKRYDEHHQDLTLLKALVRQQLPEKYKEIFFDQSKNGYAGYIDGGASQEEFYKFIKPILEKMDGTEELLVKLNREDLLRKQRTFDNGSIPHQIHLGELHAILRRQEDFYPFLKDNREKIEKILTFRIPYYVGPLARGNSRFAWMTRKSEETITPWNFEEVVDKGASAQSFIERMTNFDKNLPNEKVLPKHSLLYEYFTVYNELTKVKYVTEGMRKPAFLSGEQKKAIVDLLFKTNRKVTVKQLKEDYFKKIECFDSVEISGVEDRFNASLGTYHDLLKIIKDKDFLDNEENEDILEDIVLTLTLFEDREMIEERLKTYAHLFDDKVMKQLKRRRYTGWGRLSRKLINGIRDKQSGKTILDFLKSDGFANRNFMQLIHDDSLTFKEDIQKAQVSGQGDSLHEHIANLAGSPAIKKGILQTVKVVDELVKVMGRHKPENIVIEMARENQTTQKGQKNSRERMKRIEEGIKELGSQILKEHPVENTQLQNEKLYLYYLQNGRDMYVDQELDINRLSDYDVDHIVPQSFLKDDSIDNKVLTRSDKARGKSDNVPSEEVVKKMKNYWRQLLNAKLITQRKFDNLTKAERGGLSELDKAGFIKRQLVETRQITKHVAQILDSRMNTKYDENDKLIREVKVITLKSKLVSDFRKDFQFYKVREINNYHHAHDAYLNAVVGTALIKKYPKLESEFVYGDYKVYDVRKMIAKSEQEIGKATAKYFFYSNIMNFFKTEITLANGEIRKRPLIETNGETGEIVWDKGRDFATVRKVLSMPQVNIVKKTEVQTGGFSKESILPKRNSDKLIARKKDWDPKKYGGFDSPTVAYSVLVVAKVEKGKSKKLKSVKELLGITIMERSSFEKNPIDFLEAKGYKEVKKDLIIKLPKYSLFELENGRKRMLASAGELQKGNELALPSKYVNFLYLASHYEKLKGSPEDNEQKQLFVEQHKHYLDEIIEQISEFSKRVILADANLDKVLSAYNKHRDKPIREQAENIIHLFTLTNLGAPAAFKYFDTTIDRKRYTSTKEVLDATLIHQSITGLYETRIDLSQLGGDGGEAAAKGGGGSSGGMNPLQLLQPLPAEIKGTKLLAHWNSGATITCIPESFLEDEQPIKKTLIKTIHGEKQQNVYYVTFKVKGRKVEAEVIASPYEYILLSPTDVPWLTQQPLQLTILVPLQEYQEKILSKTALPEDQKQQLKTLFVKYDNLWQHWENQVGHRKIRPHNIATGDYPPRPQKQYPINPKAKPSIQIVIDDLLKQGVLTPQNSTMNTPVYPVPKPDGRWRMVLDYREVNKTIPLTAAQNQHSAGILATIVRQKYKTTLDLANGFWAHPITPESYWLTAFTWQGKQYCWTRLPQGFLNSPALFTADVVDLLKEIPNVQVYVDDIYLSHDDPKEHVQQLEKVFQILLQAGYVVSLKKSEIGQKTVEFLGFNITKEGRGLTDTFKTKLLNITPPKDLKQLQSILGLLNFARNFIPNFAELVQPLYNLIASAKGKYIEWSEENTKQLNMVIEALNTASNLEERLPEQRLVIKVNTSPSAGYVRYYNETGKKPIMYLNYVFSKAELKFSMLEKLLTTMHKALIKAMDLAMGQEILVYSPIVSMTKIQKTPLPERKALPIRWITWMTYLEDPRIQFHYDKTLPELKHIPDVYTSSQSPVKHPSQYEGVFYTDGSAIKSPDPTKSNNAGMGIVHATYKPEYQVLNQWSIPLGNHTAQMAEIAAVEFACKKALKIPGPVLVITDSFYVAESANKELPYWKSNGFVNNKKKPLKHISKWKSIAECLSMKPDITIQHEKGISLQIPVFILKGNALADKLATQGSYVVNAGKRTADGSEFEKRTADGSEFESPKKKAKVE

SEQ ID NO: 7326 - protein, 2094 aa, synthetic construct
MPAAKRVKLDGGDKKYSIGLDIGTNSVGWAVITDEYKVPSKKFKVLGNTDRHSIKKNLIGALLFDSGETAEATRLKRTARRRYTRRKNRICYLQEIFSNEMAKVDDSFFHRLEESFLVEEDKKHERHPIFGNIVDEVAYHEKYPTIYHLRKKLVDSTDKADLRLIYLALAHMIKFRGHFLIEGDLNPDNSDVDKLFIQLVQTYNQLFEENPINASGVDAKAILSARLSKSRRLENLIAQLPGEKKNGLFGNLIALSLGLTPNFKSNFDLAEDAKLQLSKDTYDDDLDNLLAQIGDQYADLFLAAKNLSDAILLSDILRVNTEITKAPLSASMIKRYDEHHQDLTLLKALVRQQLPEKYKEIFFDQSKNGYAGYIDGGASQEEFYKFIKPILEKMDGTEELLVKLNREDLLRKQRTFDNGSIPHQIHLGELHAILRRQEDFYPFLKDNREKIEKILTFRIPYYVGPLARGNSRFAWMTRKSEETITPWNFEEVVDKGASAQSFIERMTNFDKNLPNEKVLPKHSLLYEYFTVYNELTKVKYVTEGMRKPAFLSGEQKKAIVDLLFKTNRKVTVKQLKEDYFKKIECFDSVEISGVEDRFNASLGTYHDLLKIIKDKDFLDNEENEDILEDIVLTLTLFEDREMIEERLKTYAHLFDDKVMKQLKRRRYTGWGRLSRKLINGIRDKQSGKTILDFLKSDGFANRNFMQLIHDDSLTFKEDIQKAQVSGQGDSLHEHIANLAGSPAIKKGILQTVKVVDELVKVMGRHKPENIVIEMARENQTTQKGQKNSRERMKRIEEGIKELGSQILKEHPVENTQLQNEKLYLYYLQNGRDMYVDQELDINRLSDYDVDHIVPQSFLKDDSIDNKVLTRSDKARGKSDNVPSEEVVKKMKNYWRQLLNAKLITQRKFDNLTKAERGGLSELDKAGFIKRQLVETRQITKHVAQILDSRMNTKYDENDKLIREVKVITLKSKLVSDFRKDFQFYKVREINNYHHAHDAYLNAVVGTALIKKYPKLESEFVYGDYKVYDVRKMIAKSEQEIGKATAKYFFYSNIMNFFKTEITLANGEIRKRPLIETNGETGEIVWDKGRDFATVRKVLSMPQVNIVKKTEVQTGGFSKESILPKRNSDKLIARKKDWDPKKYGGFDSPTVAYSVLVVAKVEKGKSKKLKSVKELLGITIMERSSFEKNPIDFLEAKGYKEVKKDLIIKLPKYSLFELENGRKRMLASAGELQKGNELALPSKYVNFLYLASHYEKLKGSPEDNEQKQLFVEQHKHYLDEIIEQISEFSKRVILADANLDKVLSAYNKHRDKPIREQAENIIHLFTLTNLGAPAAFKYFDTTIDRKRYTSTKEVLDATLIHQSITGLYETRIDLSQLGGDGGEAAAKGGGGSSGGVLNLEEEYRLHEKPVPSSIDPSWLQLFPTVWAERAGMGLANQVPPVVVELRSGASPVAVRQYPMSKEAREGIRPHIQKFLDLGVLVPCRSPWNTPLLPVKKPGTNDYRPVQDLREINKRVQDIHPTVPNPYNLLSSLPPSYTWYSVLDLKDAFFCLRLHPNSQPLFAFEWKDPEKGNTGQLTWTRLPQGFKNSPTLFNEALHRDLAPFRALNPQVVLLQYVDDLLVAAPTYEDCKKGTQKLLQELSKLGYRVSAKKAQLCQREVTYLGYLLKEGKRWLTPARKATVMKIPVPTTPRQVREFLGTAGFCRLWIPGFASLAAPLYPLTKPSIPFIWTEEHQQAFDHIKKALLSAPALALPDLTKPFTLYIDERAGVARGVLTQTLGPWRRPVAYLSKKLDPVASGWPTCLKAVAAVALLLKDADKLTLGQNVTVIASHSLESIVRQPPDRWMTNARMTHYQSLLLNERVSFAPPAVLNPATLLPVESEATPVHRCSEILAEETGTRRDLEDQPLPGVPTWYTDGSSFITEGKRRAGAPIVDGKRTVWASSLPEGTSAQKAELVALTQALRLAEGKNINIYTDSRYAFATAHIHGAIYKQRGWLTSAGKDIKNKEEILALLEAIHLPRRVAIIHCPGHQRGSNPVATGNRRADEAAKQAALSTRVLAGTTKPAGKRTADGSEFEKRTADGSEFESPKKKAKVE

SEQ ID NO: 7327 - protein, 2218 aa, synthetic construct
MPAAKRVKLDGGDKKYSIGLDIGTNSVGWAVITDEYKVPSKKFKVLGNTDRHSIKKNLIGALLFDSGETAEATRLKRTARRRYTRRKNRICYLQEIFSNEMAKVDDSFFHRLEESFLVEEDKKHERHPIFGNIVDEVAYHEKYPTIYHLRKKLVDSTDKADLRLIYLALAHMIKFRGHFLIEGDLNPDNSDVDKLFIQLVQTYNQLFEENPINASGVDAKAILSARLSKSRRLENLIAQLPGEKKNGLFGNLIALSLGLTPNFKSNFDLAEDAKLQLSKDTYDDDLDNLLAQIGDQYADLFLAAKNLSDAILLSDILRVNTEITKAPLSASMIKRYDEHHQDLTLLKALVRQQLPEKYKEIFFDQSKNGYAGYIDGGASQEEFYKFIKPILEKMDGTEELLVKLNREDLLRKQRTFDNGSIPHQIHLGELHAILRRQEDFYPFLKDNREKIEKILTFRIPYYVGPLARGNSRFAWMTRKSEETITPWNFEEVVDKGASAQSFIERMTNFDKNLPNEKVLPKHSLLYEYFTVYNELTKVKYVTEGMRKPAFLSGEQKKAIVDLLFKTNRKVTVKQLKEDYFKKIECFDSVEISGVEDRFNASLGTYHDLLKIIKDKDFLDNEENEDILEDIVLTLTLFEDREMIEERLKTYAHLFDDKVMKQLKRRRYTGWGRLSRKLINGIRDKQSGKTILDFLKSDGFANRNFMQLIHDDSLTFKEDIQKAQVSGQGDSLHEHIANLAGSPAIKKGILQTVKVVDELVKVMGRHKPENIVIEMARENQTTQKGQKNSRERMKRIEEGIKELGSQILKEHPVENTQLQNEKLYLYYLQNGRDMYVDQELDINRLSDYDVDHIVPQSFLKDDSIDNKVLTRSDKARGKSDNVPSEEVVKKMKNYWRQLLNAKLITQRKFDNLTKAERGGLSELDKAGFIKRQLVETRQITKHVAQILDSRMNTKYDENDKLIREVKVITLKSKLVSDFRKDFQFYKVREINNYHHAHDAYLNAVVGTALIKKYPKLESEFVYGDYKVYDVRKMIAKSEQEIGKATAKYFFYSNIMNFFKTEITLANGEIRKRPLIETNGETGEIVWDKGRDFATVRKVLSMPQVNIVKKTEVQTGGFSKESILPKRNSDKLIARKKDWDPKKYGGFDSPTVAYSVLVVAKVEKGKSKKLKSVKELLGITIMERSSFEKNPIDFLEAKGYKEVKKDLIIKLPKYSLFELENGRKRMLASAGELQKGNELALPSKYVNFLYLASHYEKLKGSPEDNEQKQLFVEQHKHYLDEIIEQISEFSKRVILADANLDKVLSAYNKHRDKPIREQAENIIHLFTLTNLGAPAAFKYFDTTIDRKRYTSTKEVLDATLIHQSITGLYETRIDLSQLGGDGGEAAAKGGGGSSGGTLGDQGSRGSDPLPEPRVTLTVEGIPTEFLVNTGAEHSVLTKPMGKMGSKRTVVAGATGSKVYPWTTKRLLKIGQKQVTHSFLVIPECPAPLLGRDLLTKLKAQIQFSTEGPQVTWEDRPAMCLVLNLEEEYRLHEKPVPPSIDPSWLQLFPMVWAEKAGMGLANQVPPVVVELKSDASPVAVRQYPMSKEAREGIRPHIQRFLDLGILVPCQSPWNTPLLPVKKPGTNDYRPVQDLREVNKRVQDIHPTVPNPYNLLSSLPPSHTWYSVLDLKDAFFCLKLHPNSQPLFAFEWRDPEKGNTGQLTWTRLPQGFKNSPTLFNEALHRDLASFRALNPQVVMLQYVDDLLVAAPTYRDCKEGTRRLLQELSKLGYRVSAKKAQLCREEVTYLGYLLKGGKRWLTPARKATVMKIPTPTTPRQVREFLGTAGFCRLWIPGFASLAAPLYPLTRPKVPFTWTEAHQEAFGRIKEALLSAPALALPDLTKPFALYVDEKEGVARGVLTQTLGPWRRPVAYLSKKLDPVASGWPTCLKAIAAVALLLKDADKLTLGQNVLVIAPHNLESIVRQPPDRWMTNARMTHYQSLLLNERVSFAPPAILNPATLLPVESDDTPIHICSEILAEETGTRPDLRDQPLPGVPAWYTDGSSFIMDGRRQAGAAIVDNKRTVWASNLPEGTSAQKAELIALTQALRLAEGKSINIYTDSRYAFATAHVHGAIYKQRGWLTSAGKDIKNKEEILALLEAIHLPKRVAIIHCPGHQRGTDPVATGNRKADEAAKQAAQSTRILTETTKNAGKRTADGSEFEKRTADGSEFESPKKKAKVE

SEQ ID NO: 7328 - protein, 2096 aa, synthetic construct
MPAAKRVKLDGGDKKYSIGLDIGTNSVGWAVITDEYKVPSKKFKVLGNTDRHSIKKNLIGALLFDSGETAEATRLKRTARRRYTRRKNRICYLQEIFSNEMAKVDDSFFHRLEESFLVEEDKKHERHPIFGNIVDEVAYHEKYPTIYHLRKKLVDSTDKADLRLIYLALAHMIKFRGHFLIEGDLNPDNSDVDKLFIQLVQTYNQLFEENPINASGVDAKAILSARLSKSRRLENLIAQLPGEKKNGLFGNLIALSLGLTPNFKSNFDLAEDAKLQLSKDTYDDDLDNLLAQIGDQYADLFLAAKNLSDAILLSDILRVNTEITKAPLSASMIKRYDEHHQDLTLLKALVRQQLPEKYKEIFFDQSKNGYAGYIDGGASQEEFYKFIKPILEKMDGTEELLVKLNREDLLRKQRTFDNGSIPHQIHLGELHAILRRQEDFYPFLKDNREKIEKILTFRIPYYVGPLARGNSRFAWMTRKSEETITPWNFEEVVDKGASAQSFIERMTNFDKNLPNEKVLPKHSLLYEYFTVYNELTKVKYVTEGMRKPAFLSGEQKKAIVDLLFKTNRKVTVKQLKEDYFKKIECFDSVEISGVEDRFNASLGTYHDLLKIIKDKDFLDNEENEDILEDIVLTLTLFEDREMIEERLKTYAHLFDDKVMKQLKRRRYTGWGRLSRKLINGIRDKQSGKTILDFLKSDGFANRNFMQLIHDDSLTFKEDIQKAQVSGQGDSLHEHIANLAGSPAIKKGILQTVKVVDELVKVMGRHKPENIVIEMARENQTTQKGQKNSRERMKRIEEGIKELGSQILKEHPVENTQLQNEKLYLYYLQNGRDMYVDQELDINRLSDYDVDHIVPQSFLKDDSIDNKVLTRSDKARGKSDNVPSEEVVKKMKNYWRQLLNAKLITQRKFDNLTKAERGGLSELDKAGFIKRQLVETRQITKHVAQILDSRMNTKYDENDKLIREVKVITLKSKLVSDFRKDFQFYKVREINNYHHAHDAYLNAVVGTALIKKYPKLESEFVYGDYKVYDVRKMIAKSEQEIGKATAKYFFYSNIMNFFKTEITLANGEIRKRPLIETNGETGEIVWDKGRDFATVRKVLSMPQVNIVKKTEVQTGGFSKESILPKRNSDKLIARKKDWDPKKYGGFDSPTVAYSVLVVAKVEKGKSKKLKSVKELLGITIMERSSFEKNPIDFLEAKGYKEVKKDLIIKLPKYSLFELENGRKRMLASAGELQKGNELALPSKYVNFLYLASHYEKLKGSPEDNEQKQLFVEQHKHYLDEIIEQISEFSKRVILADANLDKVLSAYNKHRDKPIREQAENIIHLFTLTNLGAPAAFKYFDTTIDRKRYTSTKEVLDATLIHQSITGLYETRIDLSQLGGDGGEAAAKGGGGSSGGTLGIEDEYRLHETSTEPDVSLGSTWLSDFPQAWAETGGMGLAVRQAPLIIPLKATSTPVSIQQYPMSHEARLGIKPHIQRLLDQGILVPCQSPWNTPLLPVKKPGTNDYRPVQDLREVNKRVEDIHPTVPNPYNLLSGLPPSHQWYTVLDLKDAFFCLRLHPTSQPLFAFEWRDPGMGISGQLTWTRLPQGFKNSPTLFNEALHRDLADFRIQHPDLILLQYVDDILLAATSELDCQQGTRALLQTLGDLGYRASAKKAQICQKQVKYLGYLLREGQRWLTEARKETVMGQPVPKTPRQLREFLGTAGFCRLWIPGFAEMAAPLYPLTKPGTLFSWGPDQQKAYQEIKQALLTAPALGLPDLTKPFELFVDEKQGYAKGVLTQKLGPWRRPVAYLSKKLDPVAAGWPPCLRMVAAIAVLTKDAGKLTMGQPLVILAPHAVEALVKQPPDRWLSNARMTHYQAMLLDTDRVQFGPVVALNPATLLPLPEEGAPHDCLEILAETHGTRPDLTDQPIPDADHTWYTDGSSFLQEGQRKAGAAVTTETEVIWAGALPAGTSAQRAELIALTQALKMAEGKRLNVYTDSRYAFATAHIHGEIYRRRGWLTSEGREIKNKSEILALLKALFLPKRLSIIHCLGHQKGDSAEARGNRLADQAAREAAIKTPPDTSTLLAGKRTADGSEFEKRTADGSEFESPKKKAKVE

SEQ ID NO: 7329 - protein, 2096 aa, synthetic construct
MPAAKRVKLDGGDKKYSIGLDIGTNSVGWAVITDEYKVPSKKFKVLGNTDRHSIKKNLIGALLFDSGETAEATRLKRTARRRYTRRKNRICYLQEIFSNEMAKVDDSFFHRLEESFLVEEDKKHERHPIFGNIVDEVAYHEKYPTIYHLRKKLVDSTDKADLRLIYLALAHMIKFRGHFLIEGDLNPDNSDVDKLFIQLVQTYNQLFEENPINASGVDAKAILSARLSKSRRLENLIAQLPGEKKNGLFGNLIALSLGLTPNFKSNFDLAEDAKLQLSKDTYDDDLDNLLAQIGDQYADLFLAAKNLSDAILLSDILRVNTEITKAPLSASMIKRYDEHHQDLTLLKALVRQQLPEKYKEIFFDQSKNGYAGYIDGGASQEEFYKFIKPILEKMDGTEELLVKLNREDLLRKQRTFDNGSIPHQIHLGELHAILRRQEDFYPFLKDNREKIEKILTFRIPYYVGPLARGNSRFAWMTRKSEETITPWNFEEVVDKGASAQSFIERMTNFDKNLPNEKVLPKHSLLYEYFTVYNELTKVKYVTEGMRKPAFLSGEQKKAIVDLLFKTNRKVTVKQLKEDYFKKIECFDSVEISGVEDRFNASLGTYHDLLKIIKDKDFLDNEENEDILEDIVLTLTLFEDREMIEERLKTYAHLFDDKVMKQLKRRRYTGWGRLSRKLINGIRDKQSGKTILDFLKSDGFANRNFMQLIHDDSLTFKEDIQKAQVSGQGDSLHEHIANLAGSPAIKKGILQTVKVVDELVKVMGRHKPENIVIEMARENQTTQKGQKNSRERMKRIEEGIKELGSQILKEHPVENTQLQNEKLYLYYLQNGRDMYVDQELDINRLSDYDVDHIVPQSFLKDDSIDNKVLTRSDKARGKSDNVPSEEVVKKMKNYWRQLLNAKLITQRKFDNLTKAERGGLSELDKAGFIKRQLVETRQITKHVAQILDSRMNTKYDENDKLIREVKVITLKSKLVSDFRKDFQFYKVREINNYHHAHDAYLNAVVGTALIKKYPKLESEFVYGDYKVYDVRKMIAKSEQEIGKATAKYFFYSNIMNFFKTEITLANGEIRKRPLIETNGETGEIVWDKGRDFATVRKVLSMPQVNIVKKTEVQTGGFSKESILPKRNSDKLIARKKDWDPKKYGGFDSPTVAYSVLVVAKVEKGKSKKLKSVKELLGITIMERSSFEKNPIDFLEAKGYKEVKKDLIIKLPKYSLFELENGRKRMLASAGELQKGNELALPSKYVNFLYLASHYEKLKGSPEDNEQKQLFVEQHKHYLDEIIEQISEFSKRVILADANLDKVLSAYNKHRDKPIREQAENIIHLFTLTNLGAPAAFKYFDTTIDRKRYTSTKEVLDATLIHQSITGLYETRIDLSQLGGDGGEAAAKGGGGSSGGTLNIEDEYRLHETSKGPDVPLGSTWLSDFPQAWAETGGMGLAVRQAPLIIPLKATSTPVSIKQYPMSQEARLGIKPHIQRLLDQGILVPCQSPWNTPLLPVKKPGTNDYRPVQDLREVNKRVEDIHPTVPNPYNLLSGLPPSHQWYTVLDLKDAFFCLRLHPTSQSLFAFEWRDPEMGISGQLTWTRLPQGFKNSPTLFNEALHRDLADFRIQHPDLILLQYVDDLLLAATSELDCQQGTRALLQTLGDLGYRASAKKAQICQKQVKYLGYLLKEGQRWLTEARKETVMGQPTPKTPRQLREFLGKAGFCRLFIPGFAEMAAPLYPLTKPGTLFEWGPDQQKAYQEIKQALLTAPALGLPDLTKPFELFVDEKQGYAKGVLTQKLGPWRRPVAYLSKKLDPVAAGWPPCLRMVAAIAVLTKDAGKLTMGQPLVILAPHAVEALVKQPPDRWLSNARMTHYQALLLDTDRVQFGPIVALNPATLLPLPEEGLQHDCLDILAEAHGTRPDLTDQPLPDADHTWYTDGSSFLQEGQRKAGAAVTTETEVVWAKALPAGTSAQRAELIALTQALKMAEGKKLNVYTDSRYAFATAHIHGEIYRRRGWLTSEGKEIKNKDEILALLKALFLPKRLSIIHCPGHQKGNRAEARGNRMADQAAREVATRETPETSTLLAGKRTADGSEFEKRTADGSEFESPKKKAKVE

SEQ ID NO: 7330 - protein, 2096 aa, synthetic construct
MPAAKRVKLDGGDKKYSIGLDIGTNSVGWAVITDEYKVPSKKFKVLGNTDRHSIKKNLIGALLFDSGETAEATRLKRTARRRYTRRKNRICYLQEIFSNEMAKVDDSFFHRLEESFLVEEDKKHERHPIFGNIVDEVAYHEKYPTIYHLRKKLVDSTDKADLRLIYLALAHMIKFRGHFLIEGDLNPDNSDVDKLFIQLVQTYNQLFEENPINASGVDAKAILSARLSKSRRLENLIAQLPGEKKNGLFGNLIALSLGLTPNFKSNFDLAEDAKLQLSKDTYDDDLDNLLAQIGDQYADLFLAAKNLSDAILLSDILRVNTEITKAPLSASMIKRYDEHHQDLTLLKALVRQQLPEKYKEIFFDQSKNGYAGYIDGGASQEEFYKFIKPILEKMDGTEELLVKLNREDLLRKQRTFDNGSIPHQIHLGELHAILRRQEDFYPFLKDNREKIEKILTFRIPYYVGPLARGNSRFAWMTRKSEETITPWNFEEVVDKGASAQSFIERMTNFDKNLPNEKVLPKHSLLYEYFTVYNELTKVKYVTEGMRKPAFLSGEQKKAIVDLLFKTNRKVTVKQLKEDYFKKIECFDSVEISGVEDRFNASLGTYHDLLKIIKDKDFLDNEENEDILEDIVLTLTLFEDREMIEERLKTYAHLFDDKVMKQLKRRRYTGWGRLSRKLINGIRDKQSGKTILDFLKSDGFANRNFMQLIHDDSLTFKEDIQKAQVSGQGDSLHEHIANLAGSPAIKKGILQTVKVVDELVKVMGRHKPENIVIEMARENQTTQKGQKNSRERMKRIEEGIKELGSQILKEHPVENTQLQNEKLYLYYLQNGRDMYVDQELDINRLSDYDVDHIVPQSFLKDDSIDNKVLTRSDKARGKSDNVPSEEVVKKMKNYWRQLLNAKLITQRKFDNLTKAERGGLSELDKAGFIKRQLVETRQITKHVAQILDSRMNTKYDENDKLIREVKVITLKSKLVSDFRKDFQFYKVREINNYHHAHDAYLNAVVGTALIKKYPKLESEFVYGDYKVYDVRKMIAKSEQEIGKATAKYFFYSNIMNFFKTEITLANGEIRKRPLIETNGETGEIVWDKGRDFATVRKVLSMPQVNIVKKTEVQTGGFSKESILPKRNSDKLIARKKDWDPKKYGGFDSPTVAYSVLVVAKVEKGKSKKLKSVKELLGITIMERSSFEKNPIDFLEAKGYKEVKKDLIIKLPKYSLFELENGRKRMLASAGELQKGNELALPSKYVNFLYLASHYEKLKGSPEDNEQKQLFVEQHKHYLDEIIEQISEFSKRVILADANLDKVLSAYNKHRDKPIREQAENIIHLFTLTNLGAPAAFKYFDTTIDRKRYTSTKEVLDATLIHQSITGLYETRIDLSQLGGDGGEAAAKGGGGSSGGTLNIEDEHRLHETSKEPDVSLGSTWLSDFPQAWAETGGMGLAVRQAPLIIPLKATSTPVSIKQYPMSQEARLGIKPHIQRLLDQGILVPCQSPWNTPLLPVKKPGTNDYRPVQDLREVNKRVEDIHPTVPNPYNLLSGLPPSHQWYTVLDLKDAFFCLRLHPTSQPLFAFEWRDPEMGISGQLTWTRLPQGFKNSPTLFDEALHRDLADFRIQHPDLILLQYVDDLLLAATSELDCQQGTRALLQTLGNLGYRASAKKAQICQKQVKYLGYLLKEGQRWLTEARKETVMGQPTPKTPRQLREFLGTAGFCRLWIPGFAEMAAPLYPLTKTGTLFNWGPDQQKAYQEIKQALLTAPALGLPDLTKPFELFVDEKQGYAKGVLTQKLGPWRRPVAYLSKKLDPVAAGWPPCLRMVAAIAVLTKDAGKLTMGQPLVILAPHAVEALVKQPPDRWLSNARMTHYQALLLDTDRVQFGPVVALNPATLLPLPEEGLQHNCLDILAEAHGTRPDLTDQPLPDADHTWYTDGSSLLQEGQRKAGAAVTTETEVIWAKALPAGTSAQRAELIALTQALKMAEGKKLNVYTDSRYAFATAHIHGEIYRRRGLLTSEGKEIKNKDEILALLKALFLPKRLSIIHCPGHQKGHSAEARGNRMADQAARKAAITETPDTSTLLAGKRTADGSEFEKRTADGSEFESPKKKAKVE

SEQ ID NO: 7331 - protein, 2096 aa, synthetic construct
MPAAKRVKLDGGDKKYSIGLDIGTNSVGWAVITDEYKVPSKKFKVLGNTDRHSIKKNLIGALLFDSGETAEATRLKRTARRRYTRRKNRICYLQEIFSNEMAKVDDSFFHRLEESFLVEEDKKHERHPIFGNIVDEVAYHEKYPTIYHLRKKLVDSTDKADLRLIYLALAHMIKFRGHFLIEGDLNPDNSDVDKLFIQLVQTYNQLFEENPINASGVDAKAILSARLSKSRRLENLIAQLPGEKKNGLFGNLIALSLGLTPNFKSNFDLAEDAKLQLSKDTYDDDLDNLLAQIGDQYADLFLAAKNLSDAILLSDILRVNTEITKAPLSASMIKRYDEHHQDLTLLKALVRQQLPEKYKEIFFDQSKNGYAGYIDGGASQEEFYKFIKPILEKMDGTEELLVKLNREDLLRKQRTFDNGSIPHQIHLGELHAILRRQEDFYPFLKDNREKIEKILTFRIPYYVGPLARGNSRFAWMTRKSEETITPWNFEEVVDKGASAQSFIERMTNFDKNLPNEKVLPKHSLLYEYFTVYNELTKVKYVTEGMRKPAFLSGEQKKAIVDLLFKTNRKVTVKQLKEDYFKKIECFDSVEISGVEDRFNASLGTYHDLLKIIKDKDFLDNEENEDILEDIVLTLTLFEDREMIEERLKTYAHLFDDKVMKQLKRRRYTGWGRLSRKLINGIRDKQSGKTILDFLKSDGFANRNFMQLIHDDSLTFKEDIQKAQVSGQGDSLHEHIANLAGSPAIKKGILQTVKVVDELVKVMGRHKPENIVIEMARENQTTQKGQKNSRERMKRIEEGIKELGSQILKEHPVENTQLQNEKLYLYYLQNGRDMYVDQELDINRLSDYDVDHIVPQSFLKDDSIDNKVLTRSDKARGKSDNVPSEEVVKKMKNYWRQLLNAKLITQRKFDNLTKAERGGLSELDKAGFIKRQLVETRQITKHVAQILDSRMNTKYDENDKLIREVKVITLKSKLVSDFRKDFQFYKVREINNYHHAHDAYLNAVVGTALIKKYPKLESEFVYGDYKVYDVRKMIAKSEQEIGKATAKYFFYSNIMNFFKTEITLANGEIRKRPLIETNGETGEIVWDKGRDFATVRKVLSMPQVNIVKKTEVQTGGFSKESILPKRNSDKLIARKKDWDPKKYGGFDSPTVAYSVLVVAKVEKGKSKKLKSVKELLGITIMERSSFEKNPIDFLEAKGYKEVKKDLIIKLPKYSLFELENGRKRMLASAGELQKGNELALPSKYVNFLYLASHYEKLKGSPEDNEQKQLFVEQHKHYLDEIIEQISEFSKRVILADANLDKVLSAYNKHRDKPIREQAENIIHLFTLTNLGAPAAFKYFDTTIDRKRYTSTKEVLDATLIHQSITGLYETRIDLSQLGGDGGEAAAKGGGGSSGGTLNIEDEYRLHEISTEPDVSPGSTWLSDFPQAWAETGGMGLAVRQAPLIIPLKATSTPVSIKQYPMSQEAKLGIKPHIQRLLDQGILVPCQSPWNTPLLPVKKPGTNDYRPVQGLREVNKRVEDIHPTVPNPYNLLSGLPTSHRWYTVLDLKDAFFCLRLHPTSQPLFASEWRDPGMGISGQLTWTRLPQGFKNSPTLFNEALHRGLADFRIQHPDLILLQYVDDLLLAATSELDCQQGTRALLKTLGNLGYRASAKKAQICQKQVKYLGYLLREGQRWLTEARKETVMGQPTPKTPRQLREFLGTAGFCRLWIPRFAEMAAPLYPLTKPGTLFNWGPDQQKAYHEIKQALLTAPALGLPDLTKPFELFVDEKQGYAKGVLTQKLGPWRRPVAYLSKKLDPVAAGWPPCLRMVAAIAVLTKDAGKLTMGQPLVILAPHAVEALVKQPPDRWLSNARMTHYQAMLLDTDRVQFGPVVALNPATLLPLPEEGAPHDCLEILAETHGTEPDLTDQPIPDADHTWYTDGSSFLQEGQRKAGAAVTTETEVIWARALPAGTSAQRAELIALTQALKMAEGKRLNVYTDSRYAFATAHIHGEIYKRRGWLTSEGREIKNKSEILALLKALFLPKRLSIIHCLGHQKGDSAEARGNRLADQAAREAAIKTPPDTSTLLAGKRTADGSEFEKRTADGSEFESPKKKAKVE

SEQ ID NO: 7332 - protein, 2087 aa, synthetic construct
MPAAKRVKLDGGDKKYSIGLDIGTNSVGWAVITDEYKVPSKKFKVLGNTDRHSIKKNLIGALLFDSGETAEATRLKRTARRRYTRRKNRICYLQEIFSNEMAKVDDSFFHRLEESFLVEEDKKHERHPIFGNIVDEVAYHEKYPTIYHLRKKLVDSTDKADLRLIYLALAHMIKFRGHFLIEGDLNPDNSDVDKLFIQLVQTYNQLFEENPINASGVDAKAILSARLSKSRRLENLIAQLPGEKKNGLFGNLIALSLGLTPNFKSNFDLAEDAKLQLSKDTYDDDLDNLLAQIGDQYADLFLAAKNLSDAILLSDILRVNTEITKAPLSASMIKRYDEHHQDLTLLKALVRQQLPEKYKEIFFDQSKNGYAGYIDGGASQEEFYKFIKPILEKMDGTEELLVKLNREDLLRKQRTFDNGSIPHQIHLGELHAILRRQEDFYPFLKDNREKIEKILTFRIPYYVGPLARGNSRFAWMTRKSEETITPWNFEEVVDKGASAQSFIERMTNFDKNLPNEKVLPKHSLLYEYFTVYNELTKVKYVTEGMRKPAFLSGEQKKAIVDLLFKTNRKVTVKQLKEDYFKKIECFDSVEISGVEDRFNASLGTYHDLLKIIKDKDFLDNEENEDILEDIVLTLTLFEDREMIEERLKTYAHLFDDKVMKQLKRRRYTGWGRLSRKLINGIRDKQSGKTILDFLKSDGFANRNFMQLIHDDSLTFKEDIQKAQVSGQGDSLHEHIANLAGSPAIKKGILQTVKVVDELVKVMGRHKPENIVIEMARENQTTQKGQKNSRERMKRIEEGIKELGSQILKEHPVENTQLQNEKLYLYYLQNGRDMYVDQELDINRLSDYDVDHIVPQSFLKDDSIDNKVLTRSDKARGKSDNVPSEEVVKKMKNYWRQLLNAKLITQRKFDNLTKAERGGLSELDKAGFIKRQLVETRQITKHVAQILDSRMNTKYDENDKLIREVKVITLKSKLVSDFRKDFQFYKVREINNYHHAHDAYLNAVVGTALIKKYPKLESEFVYGDYKVYDVRKMIAKSEQEIGKATAKYFFYSNIMNFFKTEITLANGEIRKRPLIETNGETGEIVWDKGRDFATVRKVLSMPQVNIVKKTEVQTGGFSKESILPKRNSDKLIARKKDWDPKKYGGFDSPTVAYSVLVVAKVEKGKSKKLKSVKELLGITIMERSSFEKNPIDFLEAKGYKEVKKDLIIKLPKYSLFELENGRKRMLASAGELQKGNELALPSKYVNFLYLASHYEKLKGSPEDNEQKQLFVEQHKHYLDEIIEQISEFSKRVILADANLDKVLSAYNKHRDKPIREQAENIIHLFTLTNLGAPAAFKYFDTTIDRKRYTSTKEVLDATLIHQSITGLYETRIDLSQLGGDGGEAAAKGGGGSSGGIPWLMKKPLQLTTLVPLQEYEERLLKQTMLTGSYKEKLQSLFLKYDALWQHWENQVGHRRIKPHHIATGTVNPRPQKQYPINPKAKASIQTVINDLLKQGVLIQQNSIMNTPVYPVPKPDGKWRMVLDYREVNKTIPLIAAQNQHSAGILSSIFRGKYKTTLDLSNGFWAHSITPESYWLTAFTWLGQQYCWTRLPQGFLNSPALFNADVVDLLKEVPNVQVYVDDIYISHDDPREHLEQLEKVFSLLLNAGYVVSLKKSEIAQHEVEFLGFNITKEGRGLTETFKQKLLNITPPRDLKQLQSILGLLNFARNFIPNFSELVKPLYNIIATAPGKYITWTTDNSQQLQNIISMLNSAENLEERNPEVRLIMKVNTSPSAGYIRFYNEFAKRPIMYLNYVYTKAEVKFTNTEKLLTTIHKGLIKALDLGMGQEILVYSPIVSMTKIQKTPLPERKALPIRWITWMSYLEDPRIQFHYDKTLPELQQVPTVTDDIIAKIKHPSEFSMVFYTDGSAIKHPNVNKSHNAGMGIAQVQFKPEFTVINTWSIPLGDHTAQLAEVAAVEFACKKALKIDGPVLIVTDSFYVAESVNKELPYWQSNGFFNNKKKPLKHVSKWKSIADCIQLKPDIIIIHEKGHQPTASTFHTEGNNLADKLATQGSYVVNAGKRTADGSEFEKRTADGSEFESPKKKAKVE

SEQ ID NO: 7333 - protein, 2176 aa, synthetic construct
MPAAKRVKLDGGDKKYSIGLDIGTNSVGWAVITDEYKVPSKKFKVLGNTDRHSIKKNLIGALLFDSGETAEATRLKRTARRRYTRRKNRICYLQEIFSNEMAKVDDSFFHRLEESFLVEEDKKHERHPIFGNIVDEVAYHEKYPTIYHLRKKLVDSTDKADLRLIYLALAHMIKFRGHFLIEGDLNPDNSDVDKLFIQLVQTYNQLFEENPINASGVDAKAILSARLSKSRRLENLIAQLPGEKKNGLFGNLIALSLGLTPNFKSNFDLAEDAKLQLSKDTYDDDLDNLLAQIGDQYADLFLAAKNLSDAILLSDILRVNTEITKAPLSASMIKRYDEHHQDLTLLKALVRQQLPEKYKEIFFDQSKNGYAGYIDGGASQEEFYKFIKPILEKMDGTEELLVKLNREDLLRKQRTFDNGSIPHQIHLGELHAILRRQEDFYPFLKDNREKIEKILTFRIPYYVGPLARGNSRFAWMTRKSEETITPWNFEEVVDKGASAQSFIERMTNFDKNLPNEKVLPKHSLLYEYFTVYNELTKVKYVTEGMRKPAFLSGEQKKAIVDLLFKTNRKVTVKQLKEDYFKKIECFDSVEISGVEDRFNASLGTYHDLLKIIKDKDFLDNEENEDILEDIVLTLTLFEDREMIEERLKTYAHLFDDKVMKQLKRRRYTGWGRLSRKLINGIRDKQSGKTILDFLKSDGFANRNFMQLIHDDSLTFKEDIQKAQVSGQGDSLHEHIANLAGSPAIKKGILQTVKVVDELVKVMGRHKPENIVIEMARENQTTQKGQKNSRERMKRIEEGIKELGSQILKEHPVENTQLQNEKLYLYYLQNGRDMYVDQELDINRLSDYDVDHIVPQSFLKDDSIDNKVLTRSDKARGKSDNVPSEEVVKKMKNYWRQLLNAKLITQRKFDNLTKAERGGLSELDKAGFIKRQLVETRQITKHVAQILDSRMNTKYDENDKLIREVKVITLKSKLVSDFRKDFQFYKVREINNYHHAHDAYLNAVVGTALIKKYPKLESEFVYGDYKVYDVRKMIAKSEQEIGKATAKYFFYSNIMNFFKTEITLANGEIRKRPLIETNGETGEIVWDKGRDFATVRKVLSMPQVNIVKKTEVQTGGFSKESILPKRNSDKLIARKKDWDPKKYGGFDSPTVAYSVLVVAKVEKGKSKKLKSVKELLGITIMERSSFEKNPIDFLEAKGYKEVKKDLIIKLPKYSLFELENGRKRMLASAGELQKGNELALPSKYVNFLYLASHYEKLKGSPEDNEQKQLFVEQHKHYLDEIIEQISEFSKRVILADANLDKVLSAYNKHRDKPIREQAENIIHLFTLTNLGAPAAFKYFDTTIDRKRYTSTKEVLDATLIHQSITGLYETRIDLSQLGGDGGEAAAKGGGGSSGGMDPLQLLQPLEAEIKGTKLKAHWNSGATITCVPQAFLEEEVPIKNIWIKTIHGEKEQPVYYLTFKIQGRKVEAEVISSPYDYILVSPSDIPWLMKKPLQLTTLVPLQEYEERLLKQTMLTGSYKEKLQSLFLKYDALWQHWENQVGHRRIKPHHIATGTVNPRPQKQYPINPKAKASIQTVINDLLKQGVLIQQNSIMNTPVYPVPKPDGKWRMVLDYREVNKTIPLIAAQNQHSAGILSSIFRGKYKTTLDLSNGFWAHSITPESYWLTAFTWLGQQYCWTRLPQGFLNSPALFNADVVDLLKEVPNVQVYVDDIYISHDDPREHLEQLEKVFSLLLNAGYVVSLKKSEIAQHEVEFLGFNITKEGRGLTETFKQKLLNITPPRDLKQLQSILGKLNFARNFIPNFSELVKPLYNIIATAPGKYITWTTDNSQQLQNIISMLNSAENLEERNPEVRLIMKVNTSPSAGYIRFYNEFAKRPIMYLNYVYTKAEVKFTNTEKLLTTIHKGLIKALDLGMGQEILVYSPIVSMTKIQKTPLPERKALPIRWITWMSYLEDPRIQFHYDKTLPELQQVPTVTDDIIAKIKHPSEFSMVFYTDGSAIKHPNVNKSHNAGMGIAQVQFKPEFTVINTWSIPLGDHTAQLAEVAAVEFACKKALKIDGPVLIVTDSFYVAESVNKELPYWQSNGFFNNKKKPLKHVSKWKSIADCIQLKPDIIIIHEKGHQPTASTFHTEGNNLADKLATQGSYVVNAGKRTADGSEFEKRTADGSEFESPKKKAKVE

SEQ ID NO: 7334 - protein, 2087 aa, synthetic construct
MPAAKRVKLDGGDKKYSIGLDIGTNSVGWAVITDEYKVPSKKFKVLGNTDRHSIKKNLIGALLFDSGETAEATRLKRTARRRYTRRKNRICYLQEIFSNEMAKVDDSFFHRLEESFLVEEDKKHERHPIFGNIVDEVAYHEKYPTIYHLRKKLVDSTDKADLRLIYLALAHMIKFRGHFLIEGDLNPDNSDVDKLFIQLVQTYNQLFEENPINASGVDAKAILSARLSKSRRLENLIAQLPGEKKNGLFGNLIALSLGLTPNFKSNFDLAEDAKLQLSKDTYDDDLDNLLAQIGDQYADLFLAAKNLSDAILLSDILRVNTEITKAPLSASMIKRYDEHHQDLTLLKALVRQQLPEKYKEIFFDQSKNGYAGYIDGGASQEEFYKFIKPILEKMDGTEELLVKLNREDLLRKQRTFDNGSIPHQIHLGELHAILRRQEDFYPFLKDNREKIEKILTFRIPYYVGPLARGNSRFAWMTRKSEETITPWNFEEVVDKGASAQSFIERMTNFDKNLPNEKVLPKHSLLYEYFTVYNELTKVKYVTEGMRKPAFLSGEQKKAIVDLLFKTNRKVTVKQLKEDYFKKIECFDSVEISGVEDRFNASLGTYHDLLKIIKDKDFLDNEENEDILEDIVLTLTLFEDREMIEERLKTYAHLFDDKVMKQLKRRRYTGWGRLSRKLINGIRDKQSGKTILDFLKSDGFANRNFMQLIHDDSLTFKEDIQKAQVSGQGDSLHEHIANLAGSPAIKKGILQTVKVVDELVKVMGRHKPENIVIEMARENQTTQKGQKNSRERMKRIEEGIKELGSQILKEHPVENTQLQNEKLYLYYLQNGRDMYVDQELDINRLSDYDVDHIVPQSFLKDDSIDNKVLTRSDKARGKSDNVPSEEVVKKMKNYWRQLLNAKLITQRKFDNLTKAERGGLSELDKAGFIKRQLVETRQITKHVAQILDSRMNTKYDENDKLIREVKVITLKSKLVSDFRKDFQFYKVREINNYHHAHDAYLNAVVGTALIKKYPKLESEFVYGDYKVYDVRKMIAKSEQEIGKATAKYFFYSNIMNFFKTEITLANGEIRKRPLIETNGETGEIVWDKGRDFATVRKVLSMPQVNIVKKTEVQTGGFSKESILPKRNSDKLIARKKDWDPKKYGGFDSPTVAYSVLVVAKVEKGKSKKLKSVKELLGITIMERSSFEKNPIDFLEAKGYKEVKKDLIIKLPKYSLFELENGRKRMLASAGELQKGNELALPSKYVNFLYLASHYEKLKGSPEDNEQKQLFVEQHKHYLDEIIEQISEFSKRVILADANLDKVLSAYNKHRDKPIREQAENIIHLFTLTNLGAPAAFKYFDTTIDRKRYTSTKEVLDATLIHQSITGLYETRIDLSQLGGDGGEAAAKGGGGSSGGVPWLTQQPLQLTILVPLQEYQDRILNKTALPEEQKQQLKALFTKYDNLWQHWENQVGHRKIRPHNIATGDYPPRPQKQYPINPKAKPSIQIVIDDLLKQGVLTPQNSTMNTPVYPVPKPDGRWRMVLDYREVNKTIPLTAAQNQHSAGILATIVRQKYKTTLDLANGFWAHPITPDSYWLTAFTWQGKQYCWTRLPQGFLNSPALFNADAVDLLKEVPNVQVYVDDIYLSHDNPHEHIQQLEKVFQILLQAGYVVSLKKSEIGQRTVEFLGFNITKEGRGLTDTFKTKLLNVTPPKDLKQLQSILGKLNFARNFIPNFAELVQTLYNLIASSPGKYIEWTEDNTKQLNKVIEALNTASNLEERLPDQRLVIKVNTSPSAGYVRYYNESGKKPIMYLNYVFSKAELKFSMLEKLLTTMHKALIKAMDLAMGQEILVYSPIVSMTKIQKTPLPERKALPIRWITWMTYLEDPRIQFHYDKTLPELKHIPDVYTSSIPPLKHPSQYEGVFCTDGSAIKSPDPTKSNNAGMGIVHAIYNPEYKILNQWSIPLGHHTAQMAEIAAVEFACKKALKVPGPVLVITDSFYVAESANKELPYWKSNGFVNNKKEPLKHISKWKSIAECLSIKPDITIQHEKGHQPINTSIHTEGNALADKLATQGSYVVNAGKRTADGSEFEKRTADGSEFESPKKKAKVE

SEQ ID NO: 7335 - protein, 2094 aa, synthetic construct; identical to SEQ ID NO: 4531

SEQ ID NO: 7336 - protein, 2098 aa, synthetic construct
MPAAKRVKLDGGDKKYSIGLDIGTNSVGWAVITDEYKVPSKKFKVLGNTDRHSIKKNLIGALLFDSGETAEATRLKRTARRRYTRRKNRICYLQEIFSNEMAKVDDSFFHRLEESFLVEEDKKHERHPIFGNIVDEVAYHEKYPTIYHLRKKLVDSTDKADLRLIYLALAHMIKFRGHFLIEGDLNPDNSDVDKLFIQLVQTYNQLFEENPINASGVDAKAILSARLSKSRRLENLIAQLPGEKKNGLFGNLIALSLGLTPNFKSNFDLAEDAKLQLSKDTYDDDLDNLLAQIGDQYADLFLAAKNLSDAILLSDILRVNTEITKAPLSASMIKRYDEHHQDLTLLKALVRQQLPEKYKEIFFDQSKNGYAGYIDGGASQEEFYKFIKPILEKMDGTEELLVKLNREDLLRKQRTFDNGSIPHQIHLGELHAILRRQEDFYPFLKDNREKIEKILTFRIPYYVGPLARGNSRFAWMTRKSEETITPWNFEEVVDKGASAQSFIERMTNFDKNLPNEKVLPKHSLLYEYFTVYNELTKVKYVTEGMRKPAFLSGEQKKAIVDLLFKTNRKVTVKQLKEDYFKKIECFDSVEISGVEDRFNASLGTYHDLLKIIKDKDFLDNEENEDILEDIVLTLTLFEDREMIEERLKTYAHLFDDKVMKQLKRRRYTGWGRLSRKLINGIRDKQSGKTILDFLKSDGFANRNFMQLIHDDSLTFKEDIQKAQVSGQGDSLHEHIANLAGSPAIKKGILQTVKVVDELVKVMGRHKPENIVIEMARENQTTQKGQKNSRERMKRIEEGIKELGSQILKEHPVENTQLQNEKLYLYYLQNGRDMYVDQELDINRLSDYDVDHIVPQSFLKDDSIDNKVLTRSDKARGKSDNVPSEEVVKKMKNYWRQLLNAKLITQRKFDNLTKAERGGLSELDKAGFIKRQLVETRQITKHVAQILDSRMNTKYDENDKLIREVKVITLKSKLVSDFRKDFQFYKVREINNYHHAHDAYLNAVVGTALIKKYPKLESEFVYGDYKVYDVRKMIAKSEQEIGKATAKYFFYSNIMNFFKTEITLANGEIRKRPLIETNGETGEIVWDKGRDFATVRKVLSMPQVNIVKKTEVQTGGFSKESILPKRNSDKLIARKKDWDPKKYGGFDSPTVAYSVLVVAKVEKGKSKKLKSVKELLGITIMERSSFEKNPIDFLEAKGYKEVKKDLIIKLPKYSLFELENGRKRMLASAGELQKGNELALPSKYVNFLYLASHYEKLKGSPEDNEQKQLFVEQHKHYLDEIIEQISEFSKRVILADANLDKVLSAYNKHRDKPIREQAENIIHLFTLTNLGAPAAFKYFDTTIDRKRYTSTKEVLDATLIHQSITGLYETRIDLSQLGGDGGEAAAKGSSGGGGGTAPLEEEYRLFLEAPIQNVTLLEQWKREIPKVWAEINPPGLASTQAPIHVQLLSTALPVRVRQYPITLEAKRSLRETIRKFRAAGILRPVHSPWNTPLLPVRKSGTSEYRMVQDLREVNKRVETIHPTVPNPYTLLSLLPPDRIWYSVLDLKDAFFCIPLAPESQLIFAFEWADAEEGESGQLTWTRLPQGFKNSPTLFNEALNRDLQGFRLDHPSVSLLQYVDDLLIAADTQAACLSATRDLLMTLAELGYRVSGKKAQLCQEEVTYLGFKIHKGSRSLSNSRTQAILQIPVPKTKRQVREFLGTIGYCRLWIPGFAELAQPLYAATRPGNDPLVWGEKEEEAFQSLKLALTQPPALALPSLDKPFQLFVEETSGAAKGVLTQALGPWKRPVAYLSKRLDPVAAGWPRCLRAIAAAALLTREASKLTFGQDIEITSSHNLESLLRSPPDKWLTNARITQYQVLLLDPPRVRFKQTAALNPATLLPETDDTLPIHHCLDTLDSLTSTRPDLTDQPLAQAEATLFTDGSSYIRDGKRYAGAAVVTLDSVIWAEPLPIGTSAQKAELIALTKALEWSKDKSVNIYTDSRYAFATLHVHGMIYRERGWLTAGGKAIKNAPEILALLTAVWLPKRVAVMHCKGHQKDDAPTSTGNRRADEVAREVAIRPLSTQATISAGKRTADGSEFEKRTADGSEFESPKKKAKVE

SEQ ID NO: 7337 - protein, 2173 aa, synthetic construct
MPAAKRVKLDGGDKKYSIGLDIGTNSVGWAVITDEYKVPSKKFKVLGNTDRHSIKKNLIGALLFDSGETAEATRLKRTARRRYTRRKNRICYLQEIFSNEMAKVDDSFFHRLEESFLVEEDKKHERHPIFGNIVDEVAYHEKYPTIYHLRKKLVDSTDKADLRLIYLALAHMIKFRGHFLIEGDLNPDNSDVDKLFIQLVQTYNQLFEENPINASGVDAKAILSARLSKSRRLENLIAQLPGEKKNGLFGNLIALSLGLTPNFKSNFDLAEDAKLQLSKDTYDDDLDNLLAQIGDQYADLFLAAKNLSDAILLSDILRVNTEITKAPLSASMIKRYDEHHQDLTLLKALVRQQLPEKYKEIFFDQSKNGYAGYIDGGASQEEFYKFIKPILEKMDGTEELLVKLNREDLLRKQRTFDNGSIPHQIHLGELHAILRRQEDFYPFLKDNREKIEKILTFRIPYYVGPLARGNSRFAWMTRKSEETITPWNFEEVVDKGASAQSFIERMTNFDKNLPNEKVLPKHSLLYEYFTVYNELTKVKYVTEGMRKPAFLSGEQKKAIVDLLFKTNRKVTVKQLKEDYFKKIECFDSVEISGVEDRFNASLGTYHDLLKIIKDKDFLDNEENEDILEDIVLTLTLFEDREMIEERLKTYAHLFDDKVMKQLKRRRYTGWGRLSRKLINGIRDKQSGKTILDFLKSDGFANRNFMQLIHDDSLTFKEDIQKAQVSGQGDSLHEHIANLAGSPAIKKGILQTVKVVDELVKVMGRHKPENIVIEMARENQTTQKGQKNSRERMKRIEEGIKELGSQILKEHPVENTQLQNEKLYLYYLQNGRDMYVDQELDINRLSDYDVDHIVPQSFLKDDSIDNKVLTRSDKARGKSDNVPSEEVVKKMKNYWRQLLNAKLITQRKFDNLTKAERGGLSELDKAGFIKRQLVETRQITKHVAQILDSRMNTKYDENDKLIREVKVITLKSKLVSDFRKDFQFYKVREINNYHHAHDAYLNAVVGTALIKKYPKLESEFVYGDYKVYDVRKMIAKSEQEIGKATAKYFFYSNIMNFFKTEITLANGEIRKRPLIETNGETGEIVWDKGRDFATVRKVLSMPQVNIVKKTEVQTGGFSKESILPKRNSDKLIARKKDWDPKKYGGFDSPTVAYSVLVVAKVEKGKSKKLKSVKELLGITIMERSSFEKNPIDFLEAKGYKEVKKDLIIKLPKYSLFELENGRKRMLASAGELQKGNELALPSKYVNFLYLASHYEKLKGSPEDNEQKQLFVEQHKHYLDEIIEQISEFSKRVILADANLDKVLSAYNKHRDKPIREQAENIIHLFTLTNLGAPAAFKYFDTTIDRKRYTSTKEVLDATLIHQSITGLYETRIDLSQLGGDGGEAAAKGSSGGGGGMDLLKPLTVERKGVKIKGYWNSQADITCVPKDLLQGEEPVRQQNVTTIHGTQEGDVYYVNLKIDGRRINTEVIGTTLDYAIITPGDVPWILKKPLELTIKLDLEEQQGTLLNNSILSKKGKEELKQLFEKYSALWQSWENQVGHRRIRPHKIATGTVKPTPQKQYHINPKAKPDIQIVINDLLKQGVLIQKESTMNTPVYPVPKPNGRWRMVLDYRAVNKVTPLIAVQNQHSYGILGSLFKGRYKTTIDLSNGFWAHPIVPEDYWITAFTWQGKQYCWTVLPQGFLNSPGLFTGDVVDLLQGIPNVEVYVDDVYISHDSEKEHLEYLDILFNRLKEAGYIISLKKSNIANSIVDFLGFQITNEGRGLTDTFKEKLENITAPTTLKQLQSILGLLNFARNFIPDFTELIAPLYALIPKSTKNYVPWQIEHSTTLETLITKLNGAEYLQGRKGDKTLIMKVNASYTTGYIRYYNEGEKKPISYVSIVFSKTELKFTELEKLLTTVHKGLLKALDLSMGQNIHVYSPIVSMQNIQKTPQTAKKALASRWLSWLSYLEDPRIRFFYDPQMPALKDLPAVDTGKDNKKHPSNFQHIFYTDGSAITSPTKEGHLNAGMGIVYFINKDGNLQKQQEWSISLGNHTAQFAEIAAFEFALKKCLPLGGNILVVTDSNYVAKAYNEELDVWASNGFVNNRKKPLKHISKWKSVADLKRLRPDVVVTHEPGHQKLDSSPHAYGNNLADQLATQASFKVHAGKRTADGSEFEKRTADGSEFESPKKKAKVE

SEQ ID NO: 7338 - protein, 2127 aa, synthetic construct
MPAAKRVKLDGGDKKYSIGLDIGTNSVGWAVITDEYKVPSKKFKVLGNTDRHSIKKNLIGALLFDSGETAEATRLKRTARRRYTRRKNRICYLQEIFSNEMAKVDDSFFHRLEESFLVEEDKKHERHPIFGNIVDEVAYHEKYPTIYHLRKKLVDSTDKADLRLIYLALAHMIKFRGHFLIEGDLNPDNSDVDKLFIQLVQTYNQLFEENPINASGVDAKAILSARLSKSRRLENLIAQLPGEKKNGLFGNLIALSLGLTPNFKSNFDLAEDAKLQLSKDTYDDDLDNLLAQIGDQYADLFLAAKNLSDAILLSDILRVNTEITKAPLSASMIKRYDEHHQDLTLLKALVRQQLPEKYKEIFFDQSKNGYAGYIDGGASQEEFYKFIKPILEKMDGTEELLVKLNREDLLRKQRTFDNGSIPHQIHLGELHAILRRQEDFYPFLKDNREKIEKILTFRIPYYVGPLARGNSRFAWMTRKSEETITPWNFEEVVDKGASAQSFIERMTNFDKNLPNEKVLPKHSLLYEYFTVYNELTKVKYVTEGMRKPAFLSGEQKKAIVDLLFKTNRKVTVKQLKEDYFKKIECFDSVEISGVEDRFNASLGTYHDLLKIIKDKDFLDNEENEDILEDIVLTLTLFEDREMIEERLKTYAHLFDDKVMKQLKRRRYTGWGRLSRKLINGIRDKQSGKTILDFLKSDGFANRNFMQLIHDDSLTFKEDIQKAQVSGQGDSLHEHIANLAGSPAIKKGILQTVKVVDELVKVMGRHKPENIVIEMARENQTTQKGQKNSRERMKRIEEGIKELGSQILKEHPVENTQLQNEKLYLYYLQNGRDMYVDQELDINRLSDYDVDHIVPQSFLKDDSIDNKVLTRSDKARGKSDNVPSEEVVKKMKNYWRQLLNAKLITQRKFDNLTKAERGGLSELDKAGFIKRQLVETRQITKHVAQILDSRMNTKYDENDKLIREVKVITLKSKLVSDFRKDFQFYKVREINNYHHAHDAYLNAVVGTALIKKYPKLESEFVYGDYKVYDVRKMIAKSEQEIGKATAKYFFYSNIMNFFKTEITLANGEIRKRPLIETNGETGEIVWDKGRDFATVRKVLSMPQVNIVKKTEVQTGGFSKESILPKRNSDKLIARKKDWDPKKYGGFDSPTVAYSVLVVAKVEKGKSKKLKSVKELLGITIMERSSFEKNPIDFLEAKGYKEVKKDLIIKLPKYSLFELENGRKRMLASAGELQKGNELALPSKYVNFLYLASHYEKLKGSPEDNEQKQLFVEQHKHYLDEIIEQISEFSKRVILADANLDKVLSAYNKHRDKPIREQAENIIHLFTLTNLGAPAAFKYFDTTIDRKRYTSTKEVLDATLIHQSITGLYETRIDLSQLGGDGGEAAAKGSSGGGGGLLGRDLLTKLKAQIQFSTEGPQVTWEDRPAMCLVLNLEEEYRLHEKPVPPSIDPSWLQLFPMVWAEKAGMGLANQVPPVVVELKSDASPVAVRQYPMSKEAREGIRPHIQRFLDLGILVPCQSPWNTPLLPVKKPGTNDYRPVQDLREVNKRVQDIHPTVPNPYNLLSSLPPSHTWYSVLDLKDAFFCLKLHPNSQPLFAFEWRDPEKGNTGQLTWTRLPQGFKNSPTLFNEALHRDLASFRALNPQVVMLQYVDDLLVAAPTYRDCKEGTRRLLQELSKLGYRVSAKKAQLCREEVTYLGYLLKGGKRWLTPARKATVMKIPTPTTPRQVREFLGTAGFCRLWIPGFASLAAPLYPLTRPKVPFTWTEAHQEAFGRIKEALLSAPALALPDLTKPFALYVDEKEGVARGVLTQTLGPWRRPVAYLSKKLDPVASGWPTCLKAIAAVALLLKDADKLTLGQNVLVIAPHNLESIVRQPPDRWMTNARMTHYQSLLLNERVSFAPPAILNPATLLPVESDDTPIHICSEILAEETGTRPDLRDQPLPGVPAWYTDGSSFIMDGRRQAGAAIVDNKRTVWASNLPEGTSAQKAELIALTQALRLAEGKSINIYTDSRYAFATAHVHGAIYKQRGWLTSAGKDIKNKEEILALLEAIHLPKRVAIIHCPGHQRGTDPVATGNRKADEAAKQAAQSTRILTETTKNAGKRTADGSEFEKRTADGSEFESPKKKAKVE

SEQ ID NO: 7339 - protein, 2218 aa, synthetic construct
MPAAKRVKLDGGDKKYSIGLDIGTNSVGWAVITDEYKVPSKKFKVLGNTDRHSIKKNLIGALLFDSGETAEATRLKRTARRRYTRRKNRICYLQEIFSNEMAKVDDSFFHRLEESFLVEEDKKHERHPIFGNIVDEVAYHEKYPTIYHLRKKLVDSTDKADLRLIYLALAHMIKFRGHFLIEGDLNPDNSDVDKLFIQLVQTYNQLFEENPINASGVDAKAILSARLSKSRRLENLIAQLPGEKKNGLFGNLIALSLGLTPNFKSNFDLAEDAKLQLSKDTYDDDLDNLLAQIGDQYADLFLAAKNLSDAILLSDILRVNTEITKAPLSASMIKRYDEHHQDLTLLKALVRQQLPEKYKEIFFDQSKNGYAGYIDGGASQEEFYKFIKPILEKMDGTEELLVKLNREDLLRKQRTFDNGSIPHQIHLGELHAILRRQEDFYPFLKDNREKIEKILTFRIPYYVGPLARGNSRFAWMTRKSEETITPWNFEEVVDKGASAQSFIERMTNFDKNLPNEKVLPKHSLLYEYFTVYNELTKVKYVTEGMRKPAFLSGEQKKAIVDLLFKTNRKVTVKQLKEDYFKKIECFDSVEISGVEDRFNASLGTYHDLLKIIKDKDFLDNEENEDILEDIVLTLTLFEDREMIEERLKTYAHLFDDKVMKQLKRRRYTGWGRLSRKLINGIRDKQSGKTILDFLKSDGFANRNFMQLIHDDSLTFKEDIQKAQVSGQGDSLHEHIANLAGSPAIKKGILQTVKVVDELVKVMGRHKPENIVIEMARENQTTQKGQKNSRERMKRIEEGIKELGSQILKEHPVENTQLQNEKLYLYYLQNGRDMYVDQELDINRLSDYDVDHIVPQSFLKDDSIDNKVLTRSDKARGKSDNVPSEEVVKKMKNYWRQLLNAKLITQRKFDNLTKAERGGLSELDKAGFIKRQLVETRQITKHVAQILDSRMNTKYDENDKLIREVKVITLKSKLVSDFRKDFQFYKVREINNYHHAHDAYLNAVVGTALIKKYPKLESEFVYGDYKVYDVRKMIAKSEQEIGKATAKYFFYSNIMNFFKTEITLANGEIRKRPLIETNGETGEIVWDKGRDFATVRKVLSMPQVNIVKKTEVQTGGFSKESILPKRNSDKLIARKKDWDPKKYGGFDSPTVAYSVLVVAKVEKGKSKKLKSVKELLGITIMERSSFEKNPIDFLEAKGYKEVKKDLIIKLPKYSLFELENGRKRMLASAGELQKGNELALPSKYVNFLYLASHYEKLKGSPEDNEQKQLFVEQHKHYLDEIIEQISEFSKRVILADANLDKVLSAYNKHRDKPIREQAENIIHLFTLTNLGAPAAFKYFDTTIDRKRYTSTKEVLDATLIHQSITGLYETRIDLSQLGGDGGEAAAKGSSGGGGGTLGDQGSRGSDPLPEPRVTLTVEGIPTEFLVNTGAEHSVLTKPMGKMGSKRTVVAGATGSKVYPWTTKRLLKIGQKQVTHSFLVIPECPAPLLGRDLLTKLKAQIQFSTEGPQVTWEDRPAMCLVLNLEEEYRLHEKPVPPSIDPSWLQLFPMVWAEKAGMGLANQVPPVVVELKSDASPVAVRQYPMSKEAREGIRPHIQRFLDLGILVPCQSPWNTPLLPVKKPGTNDYRPVQDLREVNKRVQDIHPTVPNPYNLLSSLPPSHTWYSVLDLKDAFFCLKLHPNSQPLFAFEWRDPEKGNTGQLTWTRLPQGFKNSPTLFNEALHRDLASFRALNPQVVMLQYVDDLLVAAPTYRDCKEGTRRLLQELSKLGYRVSAKKAQLCREEVTYLGYLLKGGKRWLTPARKATVMKIPTPTTPRQVREFLGKAGFCRLFIPGFASLAAPLYPLTRPKVPFTWTEAHQEAFGRIKEALLSAPALALPDLTKPFALYVDEKEGVARGVLTQTLGPWRRPVAYLSKKLDPVASGWPTCLKAIAAVALLLKDADKLTLGQNVLVIAPHNLESIVRQPPDRWMTNARMTHYQSLLLNERVSFAPPAILNPATLLPVESDDTPIHICSEILAEETGTRPDLRDQPLPGVPAWYTDGSSFIMDGRRQAGAAIVDNKRTVWASNLPEGTSAQKAELIALTQALRLAEGKSINIYTDSRYAFATAHVHGAIYKQRGWLTSAGKDIKNKEEILALLEAIHLPKRVAIIHCPGHQRGTDPVATGNRKADEAAKQAAQSTRILTETTKNAGKRTADGSEFEKRTADGSEFESPKKKAKVE

SEQ ID NO: 7340 - protein, 2096 aa, synthetic construct
MPAAKRVKLDGGDKKYSIGLDIGTNSVGWAVITDEYKVPSKKFKVLGNTDRHSIKKNLIGALLFDSGETAEATRLKRTARRRYTRRKNRICYLQEIFSNEMAKVDDSFFHRLEESFLVEEDKKHERHPIFGNIVDEVAYHEKYPTIYHLRKKLVDSTDKADLRLIYLALAHMIKFRGHFLIEGDLNPDNSDVDKLFIQLVQTYNQLFEENPINASGVDAKAILSARLSKSRRLENLIAQLPGEKKNGLFGNLIALSLGLTPNFKSNFDLAEDAKLQLSKDTYDDDLDNLLAQIGDQYADLFLAAKNLSDAILLSDILRVNTEITKAPLSASMIKRYDEHHQDLTLLKALVRQQLPEKYKEIFFDQSKNGYAGYIDGGASQEEFYKFIKPILEKMDGTEELLVKLNREDLLRKQRTFDNGSIPHQIHLGELHAILRRQEDFYPFLKDNREKIEKILTFRIPYYVGPLARGNSRFAWMTRKSEETITPWNFEEVVDKGASAQSFIERMTNFDKNLPNEKVLPKHSLLYEYFTVYNELTKVKYVTEGMRKPAFLSGEQKKAIVDLLFKTNRKVTVKQLKEDYFKKIECFDSVEISGVEDRFNASLGTYHDLLKIIKDKDFLDNEENEDILEDIVLTLTLFEDREMIEERLKTYAHLFDDKVMKQLKRRRYTGWGRLSRKLINGIRDKQSGKTILDFLKSDGFANRNFMQLIHDDSLTFKEDIQKAQVSGQGDSLHEHIANLAGSPAIKKGILQTVKVVDELVKVMGRHKPENIVIEMARENQTTQKGQKNSRERMKRIEEGIKELGSQILKEHPVENTQLQNEKLYLYYLQNGRDMYVDQELDINRLSDYDVDHIVPQSFLKDDSIDNKVLTRSDKARGKSDNVPSEEVVKKMKNYWRQLLNAKLITQRKFDNLTKAERGGLSELDKAGFIKRQLVETRQITKHVAQILDSRMNTKYDENDKLIREVKVITLKSKLVSDFRKDFQFYKVREINNYHHAHDAYLNAVVGTALIKKYPKLESEFVYGDYKVYDVRKMIAKSEQEIGKATAKYFFYSNIMNFFKTEITLANGEIRKRPLIETNGETGEIVWDKGRDFATVRKVLSMPQVNIVKKTEVQTGGFSKESILPKRNSDKLIARKKDWDPKKYGGFDSPTVAYSVLVVAKVEKGKSKKLKSVKELLGITIMERSSFEKNPIDFLEAKGYKEVKKDLIIKLPKYSLFELENGRKRMLASAGELQKGNELALPSKYVNFLYLASHYEKLKGSPEDNEQKQLFVEQHKHYLDEIIEQISEFSKRVILADANLDKVLSAYNKHRDKPIREQAENIIHLFTLTNLGAPAAFKYFDTTIDRKRYTSTKEVLDATLIHQSITGLYETRIDLSQLGGDGGEAAAKGSSGGGGGTLGIEDEYRLHETSTEPDVSLGSTWLSDFPQAWAETGGMGLAVRQAPLIIPLKATSTPVSIQQYPMSHEARLGIKPHIQRLLDQGILVPCQSPWNTPLLPVKKPGTNDYRPVQDLREVNKRVEDIHPTVPNPYNLLSGLPPSHQWYTVLDLKDAFFCLRLHPTSQPLFAFEWRDPGMGISGQLTWTRLPQGFKNSPTLFNEALHRDLADFRIQHPDLILLQYVDDILLAATSELDCQQGTRALLQTLGDLGYRASAKKAQICQKQVKYLGYLLREGQRWLTEARKETVMGQPVPKTPRQLREFLGTAGFCRLWIPGFAEMAAPLYPLTKPGTLFSWGPDQQKAYQEIKQALLTAPALGLPDLTKPFELFVDEKQGYAKGVLTQKLGPWRRPVAYLSKKLDPVAAGWPPCLRMVAAIAVLTKDAGKLTMGQPLVILAPHAVEALVKQPPDRWLSNARMTHYQAMLLDTDRVQFGPVVALNPATLLPLPEEGAPHDCLEILAETHGTRPDLTDQPIPDADHTWYTDGSSFLQEGQRKAGAAVTTETEVIWAGALPAGTSAQRAELIALTQALKMAEGKRLNVYTDSRYAFATAHIHGEIYRRRGWLTSEGREIKNKSEILALLKALFLPKRLSIIHCLGHQKGDSAEARGNRLADQAAREAAIKTPPDTSTLLAGKRTADGSEFEKRTADGSEFESPKKKAKVE

SEQ ID NO: 7341 - protein, 2096 aa, synthetic construct
MPAAKRVKLDGGDKKYSIGLDIGTNSVGWAVITDEYKVPSKKFKVLGNTDRHSIKKNLIGALLFDSGETAEATRLKRTARRRYTRRKNRICYLQEIFSNEMAKVDDSFFHRLEESFLVEEDKKHERHPIFGNIVDEVAYHEKYPTIYHLRKKLVDSTDKADLRLIYLALAHMIKFRGHFLIEGDLNPDNSDVDKLFIQLVQTYNQLFEENPINASGVDAKAILSARLSKSRRLENLIAQLPGEKKNGLFGNLIALSLGLTPNFKSNFDLAEDAKLQLSKDTYDDDLDNLLAQIGDQYADLFLAAKNLSDAILLSDILRVNTEITKAPLSASMIKRYDEHHQDLTLLKALVRQQLPEKYKEIFFDQSKNGYAGYIDGGASQEEFYKFIKPILEKMDGTEELLVKLNREDLLRKQRTFDNGSIPHQIHLGELHAILRRQEDFYPFLKDNREKIEKILTFRIPYYVGPLARGNSRFAWMTRKSEETITPWNFEEVVDKGASAQSFIERMTNFDKNLPNEKVLPKHSLLYEYFTVYNELTKVKYVTEGMRKPAFLSGEQKKAIVDLLFKTNRKVTVKQLKEDYFKKIECFDSVEISGVEDRFNASLGTYHDLLKIIKDKDFLDNEENEDILEDIVLTLTLFEDREMIEERLKTYAHLFDDKVMKQLKRRRYTGWGRLSRKLINGIRDKQSGKTILDFLKSDGFANRNFMQLIHDDSLTFKEDIQKAQVSGQGDSLHEHIANLAGSPAIKKGILQTVKVVDELVKVMGRHKPENIVIEMARENQTTQKGQKNSRERMKRIEEGIKELGSQILKEHPVENTQLQNEKLYLYYLQNGRDMYVDQELDINRLSDYDVDHIVPQSFLKDDSIDNKVLTRSDKARGKSDNVPSEEVVKKMKNYWRQLLNAKLITQRKFDNLTKAERGGLSELDKAGFIKRQLVETRQITKHVAQILDSRMNTKYDENDKLIREVKVITLKSKLVSDFRKDFQFYKVREINNYHHAHDAYLNAVVGTALIKKYPKLESEFVYGDYKVYDVRKMIAKSEQEIGKATAKYFFYSNIMNFFKTEITLANGEIRKRPLIETNGETGEIVWDKGRDFATVRKVLSMPQVNIVKKTEVQTGGFSKESILPKRNSDKLIARKKDWDPKKYGGFDSPTVAYSVLVVAKVEKGKSKKLKSVKELLGITIMERSSFEKNPIDFLEAKGYKEVKKDLIIKLPKYSLFELENGRKRMLASAGELQKGNELALPSKYVNFLYLASHYEKLKGSPEDNEQKQLFVEQHKHYLDEIIEQISEFSKRVILADANLDKVLSAYNKHRDKPIREQAENIIHLFTLTNLGAPAAFKYFDTTIDRKRYTSTKEVLDATLIHQSITGLYETRIDLSQLGGDGGEAAAKGSSGGGGGTLGIEDEYRLHETSTEPDVSLGSTWLSDFPQAWAETGGMGLAVRQAPLIIPLKATSTPVSIQQYPMSHEARLGIKPHIQRLLDQGILVPCQSPWNTPLLPVKKPGTNDYRPVQDLREVNKRVEDIHPTVPNPYNLLSGLPPSHQWYTVLDLKDAFFCLRLHPTSQPLFAFEWRDPGMGISGQLTWTRLPQGFKNSPTLFDEALHRDLADFRIQHPDLILLQYVDDILLAATSELDCQQGTRALLQTLGDLGYRASAKKAQICQKQVKYLGYLLREGQRWLTEARKETVMGQPVPKTPRQLREFLGTAGFCRLWIPGFAEMAAPLYPLTKTGTLFSWGPDQQKAYQEIKQALLTAPALGLPDLTKPFELFVDEKQGYAKGVLTQKLGPWRRPVAYLSKKLDPVAAGWPPCLRMVAAIAVLTKDAGKLTMGQPLVILAPHAVEALVKQPPDRWLSNARMTHYQAMLLDTDRVQFGPVVALNPATLLPLPEEGAPHDCLEILAETHGTRPDLTDQPIPDADHTWYTDGSSFLQEGQRKAGAAVTTETEVIWAGALPAGTSAQRAELIALTQALKMAEGKRLNVYTDSRYAFATAHIHGEIYRRRGLLTSEGREIKNKSEILALLKALFLPKRLSIIHCLGHQKGDSAEARGNRLADQAAREAAIKTPPDTSTLLAGKRTADGSEFEKRTADGSEFESPKKKAKVE

SEQ ID NO: 7342 - protein, 2096 aa, synthetic construct
MPAAKRVKLDGGDKKYSIGLDIGTNSVGWAVITDEYKVPSKKFKVLGNTDRHSIKKNLIGALLFDSGETAEATRLKRTARRRYTRRKNRICYLQEIFSNEMAKVDDSFFHRLEESFLVEEDKKHERHPIFGNIVDEVAYHEKYPTIYHLRKKLVDSTDKADLRLIYLALAHMIKFRGHFLIEGDLNPDNSDVDKLFIQLVQTYNQLFEENPINASGVDAKAILSARLSKSRRLENLIAQLPGEKKNGLFGNLIALSLGLTPNFKSNFDLAEDAKLQLSKDTYDDDLDNLLAQIGDQYADLFLAAKNLSDAILLSDILRVNTEITKAPLSASMIKRYDEHHQDLTLLKALVRQQLPEKYKEIFFDQSKNGYAGYIDGGASQEEFYKFIKPILEKMDGTEELLVKLNREDLLRKQRTFDNGSIPHQIHLGELHAILRRQEDFYPFLKDNREKIEKILTFRIPYYVGPLARGNSRFAWMTRKSEETITPWNFEEVVDKGASAQSFIERMTNFDKNLPNEKVLPKHSLLYEYFTVYNELTKVKYVTEGMRKPAFLSGEQKKAIVDLLFKTNRKVTVKQLKEDYFKKIECFDSVEISGVEDRFNASLGTYHDLLKIIKDKDFLDNEENEDILEDIVLTLTLFEDREMIEERLKTYAHLFDDKVMKQLKRRRYTGWGRLSRKLINGIRDKQSGKTILDFLKSDGFANRNFMQLIHDDSLTFKEDIQKAQVSGQGDSLHEHIANLAGSPAIKKGILQTVKVVDELVKVMGRHKPENIVIEMARENQTTQKGQKNSRERMKRIEEGIKELGSQILKEHPVENTQLQNEKLYLYYLQNGRDMYVDQELDINRLSDYDVDHIVPQSFLKDDSIDNKVLTRSDKARGKSDNVPSEEVVKKMKNYWRQLLNAKLITQRKFDNLTKAERGGLSELDKAGFIKRQLVETRQITKHVAQILDSRMNTKYDENDKLIREVKVITLKSKLVSDFRKDFQFYKVREINNYHHAHDAYLNAVVGTALIKKYPKLESEFVYGDYKVYDVRKMIAKSEQEIGKATAKYFFYSNIMNFFKTEITLANGEIRKRPLIETNGETGEIVWDKGRDFATVRKVLSMPQVNIVKKTEVQTGGFSKESILPKRNSDKLIARKKDWDPKKYGGFDSPTVAYSVLVVAKVEKGKSKKLKSVKELLGITIMERSSFEKNPIDFLEAKGYKEVKKDLIIKLPKYSLFELENGRKRMLASAGELQKGNELALPSKYVNFLYLASHYEKLKGSPEDNEQKQLFVEQHKHYLDEIIEQISEFSKRVILADANLDKVLSAYNKHRDKPIREQAENIIHLFTLTNLGAPAAFKYFDTTIDRKRYTSTKEVLDATLIHQSITGLYETRIDLSQLGGDGGEAAAKGSSGGGGGTLNIEDEYRLHETSKEPDVSLGSTWLSDFPQAWAETGGMGLAVRQAPLIIPLKATSTPVSIKQYPMSQEARLGIKPHIQRLLDQGILVPCQSPWNTPLLPVKKPGTNDYRPVQDLREVNKRVEDIHPTVPNPYNLLSGLPPSHQWYTVLDLKDAFFCLRLHPTSQPLFAFEWRDPEMGISGQLTWTRLPQGFKNSPTLFNEALHRDLAGFRIQHPDLILLQYVDDLLLAATSELDCQQGTRALLQTLGDLGYRASAKKAQICQKQVKYLGYLLKEGQRWLTEARKETVMGQPIPKTPRQLREFLGTAGFCRLWIPGFAEMAAPLYPLTKPGTLFNWGPDQQKAFQEIKQALLTAPALGLPDLTKPFELFVDEKQGYAKGVLTQKLGPWRRPVAYLSKKLDPVAAGWPPCLRMVAAIAVLTKDAGKLTMGQPLVILAPHAVEALVKQPPDRWLSNARMTHYQALLLDTDRVQFGPVVALNPATLLPLPEEGLQHDCLDILAEAHGTRSDLMDQPLPDADHTWYTDGSSFLQEGQRKAGAAVTTETEVIWARALPAGTSAQRAELIALTQALKMAEGKKLNVYTDSRYAFATAHIHGEIYRRRGWLTSEGKEIKNKDEILALLKALFLPKRLSIIHCPGHQKGNSAEARGNRMADQAAREVATRETPETSTLLAGKRTADGSEFEKRTADGSEFESPKKKAKVE

SEQ ID NO: 7343 - protein, 2096 aa, synthetic construct
MPAAKRVKLDGGDKKYSIGLDIGTNSVGWAVITDEYKVPSKKFKVLGNTDRHSIKKNLIGALLFDSGETAEATRLKRTARRRYTRRKNRICYLQEIFSNEMAKVDDSFFHRLEESFLVEEDKKHERHPIFGNIVDEVAYHEKYPTIYHLRKKLVDSTDKADLRLIYLALAHMIKFRGHFLIEGDLNPDNSDVDKLFIQLVQTYNQLFEENPINASGVDAKAILSARLSKSRRLENLIAQLPGEKKNGLFGNLIALSLGLTPNFKSNFDLAEDAKLQLSKDTYDDDLDNLLAQIGDQYADLFLAAKNLSDAILLSDILRVNTEITKAPLSASMIKRYDEHHQDLTLLKALVRQQLPEKYKEIFFDQSKNGYAGYIDGGASQEEFYKFIKPILEKMDGTEELLVKLNREDLLRKQRTFDNGSIPHQIHLGELHAILRRQEDFYPFLKDNREKIEKILTFRIPYYVGPLARGNSRFAWMTRKSEETITPWNFEEVVDKGASAQSFIERMTNFDKNLPNEKVLPKHSLLYEYFTVYNELTKVKYVTEGMRKPAFLSGEQKKAIVDLLFKTNRKVTVKQLKEDYFKKIECFDSVEISGVEDRFNASLGTYHDLLKIIKDKDFLDNEENEDILEDIVLTLTLFEDREMIEERLKTYAHLFDDKVMKQLKRRRYTGWGRLSRKLINGIRDKQSGKTILDFLKSDGFANRNFMQLIHDDSLTFKEDIQKAQVSGQGDSLHEHIANLAGSPAIKKGILQTVKVVDELVKVMGRHKPENIVIEMARENQTTQKGQKNSRERMKRIEEGIKELGSQILKEHPVENTQLQNEKLYLYYLQNGRDMYVDQELDINRLSDYDVDHIVPQSFLKDDSIDNKVLTRSDKARGKSDNVPSEEVVKKMKNYWRQLLNAKLITQRKFDNLTKAERGGLSELDKAGFIKRQLVETRQITKHVAQILDSRMNTKYDENDKLIREVKVITLKSKLVSDFRKDFQFYKVREINNYHHAHDAYLNAVVGTALIKKYPKLESEFVYGDYKVYDVRKMIAKSEQEIGKATAKYFFYSNIMNFFKTEITLANGEIRKRPLIETNGETGEIVWDKGRDFATVRKVLSMPQVNIVKKTEVQTGGFSKESILPKRNSDKLIARKKDWDPKKYGGFDSPTVAYSVLVVAKVEKGKSKKLKSVKELLGITIMERSSFEKNPIDFLEAKGYKEVKKDLIIKLPKYSLFELENGRKRMLASAGELQKGNELALPSKYVNFLYLASHYEKLKGSPEDNEQKQLFVEQHKHYLDEIIEQISEFSKRVILADANLDKVLSAYNKHRDKPIREQAENIIHLFTLTNLGAPAAFKYFDTTIDRKRYTSTKEVLDATLIHQSITGLYETRIDLSQLGGDGGEAAAKGSSGGGGGTLNIEDEHRLHETSKEPDVSLGSTWLSDFPQAWAETGGMGLAVRQAPLIIPLKATSTPVSIKQYPMSQEARLGIKPHIQRLLDQGILVPCQSPWNTPLLPVKKPGTNDYRPVQDLREVNKRVEDIHPTVPNPYNLLSGLPPSHQWYTVLDLKDAFFCLRLHPTSQPLFAFEWRDPEMGISGQLTWTRLPQGFKNSPTLFNEALHRDLADFRIQHPDLILLQYVDDLLLAATSELDCQQGTRALLQTLGNLGYRASAKKAQICQKQVKYLGYLLKEGQRWLTEARKETVMGQPTPKTPRQLREFLGTAGFCRLWIPGFAEMAAPLYPLTKPGTLFNWGPDQQKAYQEIKQALLTAPALGLPDLTKPFELFVDEKQGYAKGVLTQKLGPWRRPVAYLSKKLDPVAAGWPPCLRMVAAIAVLTKDAGKLTMGQPLVILAPHAVEALVKQPPDRWLSNARMTHYQALLLDTDRVQFGPVVALNPATLLPLPEEGLQHNCLDILAEAHGTRPDLTDQPLPDADHTWYTDGSSLLQEGQRKAGAAVTTETEVIWAKALPAGTSAQRAELIALTQALKMAEGKKLNVYTDSRYAFATAHIHGEIYRRRGWLTSEGKEIKNKDEILALLKALFLPKRLSIIHCPGHQKGHSAEARGNRMADQAARKAAITETPDTSTLLAGKRTADGSEFEKRTADGSEFESPKKKAKVE

SEQ ID NO: 7344 - protein, 2116 aa, synthetic construct
MPAAKRVKLDGGDKKYSIGLDIGTNSVGWAVITDEYKVPSKKFKVLGNTDRHSIKKNLIGALLFDSGETAEATRLKRTARRRYTRRKNRICYLQEIFSNEMAKVDDSFFHRLEESFLVEEDKKHERHPIFGNIVDEVAYHEKYPTIYHLRKKLVDSTDKADLRLIYLALAHMIKFRGHFLIEGDLNPDNSDVDKLFIQLVQTYNQLFEENPINASGVDAKAILSARLSKSRRLENLIAQLPGEKKNGLFGNLIALSLGLTPNFKSNFDLAEDAKLQLSKDTYDDDLDNLLAQIGDQYADLFLAAKNLSDAILLSDILRVNTEITKAPLSASMIKRYDEHHQDLTLLKALVRQQLPEKYKEIFFDQSKNGYAGYIDGGASQEEFYKFIKPILEKMDGTEELLVKLNREDLLRKQRTFDNGSIPHQIHLGELHAILRRQEDFYPFLKDNREKIEKILTFRIPYYVGPLARGNSRFAWMTRKSEETITPWNFEEVVDKGASAQSFIERMTNFDKNLPNEKVLPKHSLLYEYFTVYNELTKVKYVTEGMRKPAFLSGEQKKAIVDLLFKTNRKVTVKQLKEDYFKKIECFDSVEISGVEDRFNASLGTYHDLLKIIKDKDFLDNEENEDILEDIVLTLTLFEDREMIEERLKTYAHLFDDKVMKQLKRRRYTGWGRLSRKLINGIRDKQSGKTILDFLKSDGFANRNFMQLIHDDSLTFKEDIQKAQVSGQGDSLHEHIANLAGSPAIKKGILQTVKVVDELVKVMGRHKPENIVIEMARENQTTQKGQKNSRERMKRIEEGIKELGSQILKEHPVENTQLQNEKLYLYYLQNGRDMYVDQELDINRLSDYDVDHIVPQSFLKDDSIDNKVLTRSDKARGKSDNVPSEEVVKKMKNYWRQLLNAKLITQRKFDNLTKAERGGLSELDKAGFIKRQLVETRQITKHVAQILDSRMNTKYDENDKLIREVKVITLKSKLVSDFRKDFQFYKVREINNYHHAHDAYLNAVVGTALIKKYPKLESEFVYGDYKVYDVRKMIAKSEQEIGKATAKYFFYSNIMNFFKTEITLANGEIRKRPLIETNGETGEIVWDKGRDFATVRKVLSMPQVNIVKKTEVQTGGFSKESILPKRNSDKLIARKKDWDPKKYGGFDSPTVAYSVLVVAKVEKGKSKKLKSVKELLGITIMERSSFEKNPIDFLEAKGYKEVKKDLIIKLPKYSLFELENGRKRMLASAGELQKGNELALPSKYVNFLYLASHYEKLKGSPEDNEQKQLFVEQHKHYLDEIIEQISEFSKRVILADANLDKVLSAYNKHRDKPIREQAENIIHLFTLTNLGAPAAFKYFDTTIDRKRYTSTKEVLDATLIHQSITGLYETRIDLSQLGGDGGEAAAKGSSGGGGGVQEISDSRPMLHIYLNGRRFLGLLDTGADKTCIAGRDWPANWPIHQTESSLQGLGMACGVARSSQPLRWQHEDKSGIIHPFVIPTLPFTLWGRDIMKDIKVRLMTDSPDDSQDLMIGAIESNLFADQISWKSDQPVWLNQWPLKQEKLQALQQLVTEQLQLGHLEESNSPWNTPVFVIKKKSGKWRLLQDLRAVNATMHDMGALQPGLPSPVAVPKGWEIIIIDLQDCFFNIKLHPEDCKRFAFSVPSPNFKRPYQRFQWKVLPQGMKNSPTLCQKFVDKAILTVRDKYQDSYIVHYMDDILLAHPSRSIVDEILTSMIQALNKHGLVVSTEKIQKYDNLKYLGTHIQGDSVSYQKLQIRTDKLRTLNDFQKLLGNINWIRPFLKLTTGELKPLFEILNGDSNPISTRKLTPEACKALQLMNERLSTARVKRLDLSQPWSLCILKTEYTPTACLWQDGVVEWIHLPHISPKVITPYDIFCTQLIIKGRHRSKELFSKDPDYIVVPYTKVQFDLLLQEKEDWPISLLGFLGEVHFHLPKDPLLTFTLQTAIIFPHMTSTTPLEKGIVIFTDGSANGRSVTYIQGREPIIKENTQNTAQQAEIVAVITAFEEVSQPFNLYTDSKYVTGLFPEIETATLSPRTKIYTELKHLQRLIHKRQEKFYIGHIRGHTGLPGPLAQGNAYADSLTRILTAAGKRTADGSEFEKRTADGSEFESPKKKAKVE

SEQ ID NO: 7345 - protein, 2088 aa, synthetic construct
MPAAKRVKLDGGDKKYSIGLDIGTNSVGWAVITDEYKVPSKKFKVLGNTDRHSIKKNLIGALLFDSGETAEATRLKRTARRRYTRRKNRICYLQEIFSNEMAKVDDSFFHRLEESFLVEEDKKHERHPIFGNIVDEVAYHEKYPTIYHLRKKLVDSTDKADLRLIYLALAHMIKFRGHFLIEGDLNPDNSDVDKLFIQLVQTYNQLFEENPINASGVDAKAILSARLSKSRRLENLIAQLPGEKKNGLFGNLIALSLGLTPNFKSNFDLAEDAKLQLSKDTYDDDLDNLLAQIGDQYADLFLAAKNLSDAILLSDILRVNTEITKAPLSASMIKRYDEHHQDLTLLKALVRQQLPEKYKEIFFDQSKNGYAGYIDGGASQEEFYKFIKPILEKMDGTEELLVKLNREDLLRKQRTFDNGSIPHQIHLGELHAILRRQEDFYPFLKDNREKIEKILTFRIPYYVGPLARGNSRFAWMTRKSEETITPWNFEEVVDKGASAQSFIERMTNFDKNLPNEKVLPKHSLLYEYFTVYNELTKVKYVTEGMRKPAFLSGEQKKAIVDLLFKTNRKVTVKQLKEDYFKKIECFDSVEISGVEDRFNASLGTYHDLLKIIKDKDFLDNEENEDILEDIVLTLTLFEDREMIEERLKTYAHLFDDKVMKQLKRRRYTGWGRLSRKLINGIRDKQSGKTILDFLKSDGFANRNFMQLIHDDSLTFKEDIQKAQVSGQGDSLHEHIANLAGSPAIKKGILQTVKVVDELVKVMGRHKPENIVIEMARENQTTQKGQKNSRERMKRIEEGIKELGSQILKEHPVENTQLQNEKLYLYYLQNGRDMYVDQELDINRLSDYDVDHIVPQSFLKDDSIDNKVLTRSDKARGKSDNVPSEEVVKKMKNYWRQLLNAKLITQRKFDNLTKAERGGLSELDKAGFIKRQLVETRQITKHVAQILDSRMNTKYDENDKLIREVKVITLKSKLVSDFRKDFQFYKVREINNYHHAHDAYLNAVVGTALIKKYPKLESEFVYGDYKVYDVRKMIAKSEQEIGKATAKYFFYSNIMNFFKTEITLANGEIRKRPLIETNGETGEIVWDKGRDFATVRKVLSMPQVNIVKKTEVQTGGFSKESILPKRNSDKLIARKKDWDPKKYGGFDSPTVAYSVLVVAKVEKGKSKKLKSVKELLGITIMERSSFEKNPIDFLEAKGYKEVKKDLIIKLPKYSLFELENGRKRMLASAGELQKGNELALPSKYVNFLYLASHYEKLKGSPEDNEQKQLFVEQHKHYLDEIIEQISEFSKRVILADANLDKVLSAYNKHRDKPIREQAENIIHLFTLTNLGAPAAFKYFDTTIDRKRYTSTKEVLDATLIHQSITGLYETRIDLSQLGGDGGEAAAKGSSGGGGGLDDEYRLYSPLVKPDQNIQFWLEQFPQAWAETAGMGLAKQVPPQVIQLKASATPVSVRQYPLSKEAQEGIRPHVQRLIQQGILVPVQSPWNTPLLPVRKPGTNDYRPVQDLREVNKRVQDIHPTVPNPYNLLCALPPQRSWYTVLDLKDAFFCLRLHPTSQPLFAFEWRDPGTGRTGQLTWTRLPQGFKNSPTIFNEALHRDLANFRIQHPQVTLLQYVDDLLLAGATKQDCLEGTKALLLELSDLGYRASAKKAQICRREVTYLGYSLRDGQRWLTEARKKTVVQIPAPTTAKQVREFLGKAGFCRLFIPGFATLAAPLYPLTKPKGEFSWAPEHQKAFDAIKKALLSAPALALPDVTKPFTLYVDERKGVARGVLTQTLGPWRRPVAYLSKKLDPVASGWPVCLKAIAAVAILVKDADKLTLGQNITVIAPHALENIVRQPPDRWMTNARMTHYQSLLLTERVTFAPPAALNPATLLPEETDEPVTHDCHQLLIEETGVRKDLTDIPLTGEVLTWFTDGSSYVVEGKRMAGAAVVDGTRTIWASSLPEGTSAQKAELMALTQALRLAEGKSINIYTDSRYAFATAHVHGAIYKQRGWLTSAGREIKNKEEILSLLEALHLPKRLAIIHCPGHQKAKDPISRGNQMADRVAKQAAQGVNLLPAGKRTADGSEFEKRTADGSEFESPKKKAKVE

SEQ ID NO: 7346 - protein, 2088 aa, synthetic construct; identical to SEQ ID NO: 7345

SEQ ID NO: 7347 - protein, 2087 aa, synthetic construct
MPAAKRVKLDGGDKKYSIGLDIGTNSVGWAVITDEYKVPSKKFKVLGNTDRHSIKKNLIGALLFDSGETAEATRLKRTARRRYTRRKNRICYLQEIFSNEMAKVDDSFFHRLEESFLVEEDKKHERHPIFGNIVDEVAYHEKYPTIYHLRKKLVDSTDKADLRLIYLALAHMIKFRGHFLIEGDLNPDNSDVDKLFIQLVQTYNQLFEENPINASGVDAKAILSARLSKSRRLENLIAQLPGEKKNGLFGNLIALSLGLTPNFKSNFDLAEDAKLQLSKDTYDDDLDNLLAQIGDQYADLFLAAKNLSDAILLSDILRVNTEITKAPLSASMIKRYDEHHQDLTLLKALVRQQLPEKYKEIFFDQSKNGYAGYIDGGASQEEFYKFIKPILEKMDGTEELLVKLNREDLLRKQRTFDNGSIPHQIHLGELHAILRRQEDFYPFLKDNREKIEKILTFRIPYYVGPLARGNSRFAWMTRKSEETITPWNFEEVVDKGASAQSFIERMTNFDKNLPNEKVLPKHSLLYEYFTVYNELTKVKYVTEGMRKPAFLSGEQKKAIVDLLFKTNRKVTVKQLKEDYFKKIECFDSVEISGVEDRFNASLGTYHDLLKIIKDKDFLDNEENEDILEDIVLTLTLFEDREMIEERLKTYAHLFDDKVMKQLKRRRYTGWGRLSRKLINGIRDKQSGKTILDFLKSDGFANRNFMQLIHDDSLTFKEDIQKAQVSGQGDSLHEHIANLAGSPAIKKGILQTVKVVDELVKVMGRHKPENIVIEMARENQTTQKGQKNSRERMKRIEEGIKELGSQILKEHPVENTQLQNEKLYLYYLQNGRDMYVDQELDINRLSDYDVDHIVPQSFLKDDSIDNKVLTRSDKARGKSDNVPSEEVVKKMKNYWRQLLNAKLITQRKFDNLTKAERGGLSELDKAGFIKRQLVETRQITKHVAQILDSRMNTKYDENDKLIREVKVITLKSKLVSDFRKDFQFYKVREINNYHHAHDAYLNAVVGTALIKKYPKLESEFVYGDYKVYDVRKMIAKSEQEIGKATAKYFFYSNIMNFFKTEITLANGEIRKRPLIETNGETGEIVWDKGRDFATVRKVLSMPQVNIVKKTEVQTGGFSKESILPKRNSDKLIARKKDWDPKKYGGFDSPTVAYSVLVVAKVEKGKSKKLKSVKELLGITIMERSSFEKNPIDFLEAKGYKEVKKDLIIKLPKYSLFELENGRKRMLASAGELQKGNELALPSKYVNFLYLASHYEKLKGSPEDNEQKQLFVEQHKHYLDEIIEQISEFSKRVILADANLDKVLSAYNKHRDKPIREQAENIIHLFTLTNLGAPAAFKYFDTTIDRKRYTSTKEVLDATLIHQSITGLYETRIDLSQLGGDGGEAAAKGSSGGGGGIPWLMKKPLQLTTLVPLQEYEERLLKQTMLTGSYKEKLQSLFLKYDALWQHWENQVGHRRIKPHHIATGTVNPRPQKQYPINPKAKASIQTVINDLLKQGVLIQQNSIMNTPVYPVPKPDGKWRMVLDYREVNKTIPLIAAQNQHSAGILSSIFRGKYKTTLDLSNGFWAHSITPESYWLTAFTWLGQQYCWTRLPQGFLNSPALFNADVVDLLKEVPNVQVYVDDIYISHDDPREHLEQLEKVFSLLLNAGYVVSLKKSEIAQHEVEFLGFNITKEGRGLTETFKQKLLNITPPRDLKQLQSILGKLNFARNFIPNFSELVKPLYNIIATAPGKYITWTTDNSQQLQNIISMLNSAENLEERNPEVRLIMKVNTSPSAGYIRFYNEFAKRPIMYLNYVYTKAEVKFTNTEKLLTTIHKGLIKALDLGMGQEILVYSPIVSMTKIQKTPLPERKALPIRWITWMSYLEDPRIQFHYDKTLPELQQVPTVTDDIIAKIKHPSEFSMVFYTDGSAIKHPNVNKSHNAGMGIAQVQFKPEFTVINTWSIPLGDHTAQLAEVAAVEFACKKALKIDGPVLIVTDSFYVAESVNKELPYWQSNGFFNNKKKPLKHVSKWKSIADCIQLKPDIIIIHEKGHQPTASTFHTEGNNLADKLATQGSYVVNAGKRTADGSEFEKRTADGSEFESPKKKAKVE

SEQ ID NO: 7348 - protein, 2094 aa, synthetic construct
MPAAKRVKLDGGDKKYSIGLDIGTNSVGWAVITDEYKVPSKKFKVLGNTDRHSIKKNLIGALLFDSGETAEATRLKRTARRRYTRRKNRICYLQEIFSNEMAKVDDSFFHRLEESFLVEEDKKHERHPIFGNIVDEVAYHEKYPTIYHLRKKLVDSTDKADLRLIYLALAHMIKFRGHFLIEGDLNPDNSDVDKLFIQLVQTYNQLFEENPINASGVDAKAILSARLSKSRRLENLIAQLPGEKKNGLFGNLIALSLGLTPNFKSNFDLAEDAKLQLSKDTYDDDLDNLLAQIGDQYADLFLAAKNLSDAILLSDILRVNTEITKAPLSASMIKRYDEHHQDLTLLKALVRQQLPEKYKEIFFDQSKNGYAGYIDGGASQEEFYKFIKPILEKMDGTEELLVKLNREDLLRKQRTFDNGSIPHQIHLGELHAILRRQEDFYPFLKDNREKIEKILTFRIPYYVGPLARGNSRFAWMTRKSEETITPWNFEEVVDKGASAQSFIERMTNFDKNLPNEKVLPKHSLLYEYFTVYNELTKVKYVTEGMRKPAFLSGEQKKAIVDLLFKTNRKVTVKQLKEDYFKKIECFDSVEISGVEDRFNASLGTYHDLLKIIKDKDFLDNEENEDILEDIVLTLTLFEDREMIEERLKTYAHLFDDKVMKQLKRRRYTGWGRLSRKLINGIRDKQSGKTILDFLKSDGFANRNFMQLIHDDSLTFKEDIQKAQVSGQGDSLHEHIANLAGSPAIKKGILQTVKVVDELVKVMGRHKPENIVIEMARENQTTQKGQKNSRERMKRIEEGIKELGSQILKEHPVENTQLQNEKLYLYYLQNGRDMYVDQELDINRLSDYDVDHIVPQSFLKDDSIDNKVLTRSDKARGKSDNVPSEEVVKKMKNYWRQLLNAKLITQRKFDNLTKAERGGLSELDKAGFIKRQLVETRQITKHVAQILDSRMNTKYDENDKLIREVKVITLKSKLVSDFRKDFQFYKVREINNYHHAHDAYLNAVVGTALIKKYPKLESEFVYGDYKVYDVRKMIAKSEQEIGKATAKYFFYSNIMNFFKTEITLANGEIRKRPLIETNGETGEIVWDKGRDFATVRKVLSMPQVNIVKKTEVQTGGFSKESILPKRNSDKLIARKKDWDPKKYGGFDSPTVAYSVLVVAKVEKGKSKKLKSVKELLGITIMERSSFEKNPIDFLEAKGYKEVKKDLIIKLPKYSLFELENGRKRMLASAGELQKGNELALPSKYVNFLYLASHYEKLKGSPEDNEQKQLFVEQHKHYLDEIIEQISEFSKRVILADANLDKVLSAYNKHRDKPIREQAENIIHLFTLTNLGAPAAFKYFDTTIDRKRYTSTKEVLDATLIHQSITGLYETRIDLSQLGGDGGEAAAKGSSGGGGGVLNLEEEYRLHEKPVPSSIDPSWLQLFPTVWAERAGMGLANQVPPVVVELRSGASPVAVRQYPMSKEAREGIRPHIQRFLDLGVLVPCQSPWNTPLLPVKKPGTNDYRPVQDLREINKRVQDIHPTVPNPYNLLSSLPPSHTWYSVLDLKDAFFCLKLHPNSQPLFAFEWRDPEKGNTGQLTWTRLPQGFKNSPTLFDEALHRDLAPFRALNPQVVLLQYVDDLLVAAPTYRDCKEGTQKLLQELSKLGYRVSAKKAQLCQKEVTYLGYLLKEGKRWLTPARKATVMKIPPPTTPRQVREFLGTAGFCRLWIPGFASLAAPLYPLTKESIPFIWTEEHQKAFDRIKEALLSAPALALPDLTKPFTLYVDERAGVARGVLTQTLGPWRRPVAYLSKKLDPVASGWPTCLKAVAAVALLLKDADKLTLGQNVTVIASHSLESIVRQPPDRWMTNARMTHYQSLLLNERVSFAPPAVLNPATLLPVESEATPVHRCSEILAEETGTRRDLKDQPLPGVPAWYTDGSSFIAEGKRRAGAAIVDGKRTVWASSLPEGTSAQKAELVALTQALRLAEGKDINIYTDSRYAFATAHIHGAIYKQRGLLTSAGKDIKNKEEILALLEAIHLPKRVAIIHCPGHQKGNDPVATGNRRADEAAKQAALSTRVLAETTKPAGKRTADGSEFEKRTADGSEFESPKKKAKVE

SEQ ID NO: 7349 - protein, 2094 aa, synthetic construct
MPAAKRVKLDGGDKKYSIGLDIGTNSVGWAVITDEYKVPSKKFKVLGNTDRHSIKKNLIGALLFDSGETAEATRLKRTARRRYTRRKNRICYLQEIFSNEMAKVDDSFFHRLEESFLVEEDKKHERHPIFGNIVDEVAYHEKYPTIYHLRKKLVDSTDKADLRLIYLALAHMIKFRGHFLIEGDLNPDNSDVDKLFIQLVQTYNQLFEENPINASGVDAKAILSARLSKSRRLENLIAQLPGEKKNGLFGNLIALSLGLTPNFKSNFDLAEDAKLQLSKDTYDDDLDNLLAQIGDQYADLFLAAKNLSDAILLSDILRVNTEITKAPLSASMIKRYDEHHQDLTLLKALVRQQLPEKYKEIFFDQSKNGYAGYIDGGASQEEFYKFIKPILEKMDGTEELLVKLNREDLLRKQRTFDNGSIPHQIHLGELHAILRRQEDFYPFLKDNREKIEKILTFRIPYYVGPLARGNSRFAWMTRKSEETITPWNFEEVVDKGASAQSFIERMTNFDKNLPNEKVLPKHSLLYEYFTVYNELTKVKYVTEGMRKPAFLSGEQKKAIVDLLFKTNRKVTVKQLKEDYFKKIECFDSVEISGVEDRFNASLGTYHDLLKIIKDKDFLDNEENEDILEDIVLTLTLFEDREMIEERLKTYAHLFDDKVMKQLKRRRYTGWGRLSRKLINGIRDKQSGKTILDFLKSDGFANRNFMQLIHDDSLTFKEDIQKAQVSGQGDSLHEHIANLAGSPAIKKGILQTVKVVDELVKVMGRHKPENIVIEMARENQTTQKGQKNSRERMKRIEEGIKELGSQILKEHPVENTQLQNEKLYLYYLQNGRDMYVDQELDINRLSDYDVDHIVPQSFLKDDSIDNKVLTRSDKARGKSDNVPSEEVVKKMKNYWRQLLNAKLITQRKFDNLTKAERGGLSELDKAGFIKRQLVETRQITKHVAQILDSRMNTKYDENDKLIREVKVITLKSKLVSDFRKDFQFYKVREINNYHHAHDAYLNAVVGTALIKKYPKLESEFVYGDYKVYDVRKMIAKSEQEIGKATAKYFFYSNIMNFFKTEITLANGEIRKRPLIETNGETGEIVWDKGRDFATVRKVLSMPQVNIVKKTEVQTGGFSKESILPKRNSDKLIARKKDWDPKKYGGFDSPTVAYSVLVVAKVEKGKSKKLKSVKELLGITIMERSSFEKNPIDFLEAKGYKEVKKDLIIKLPKYSLFELENGRKRMLASAGELQKGNELALPSKYVNFLYLASHYEKLKGSPEDNEQKQLFVEQHKHYLDEIIEQISEFSKRVILADANLDKVLSAYNKHRDKPIREQAENIIHLFTLTNLGAPAAFKYFDTTIDRKRYTSTKEVLDATLIHQSITGLYETRIDLSQLGGDGGEAAAKGSSGGGGGVLNLEEEYRLHEKPVPSSIDPSWLQLFPTVWAERAGMGLANQVPPVVVELRSGASPVAVRQYPMSKEAREGIRPHIQRFLDLGVLVPCQSPWNTPLLPVKKPGTNDYRPVQDLREINKRVQDIHPTVPNPYNLLSSLPPSHTWYSVLDLKDAFFCLKLHPNSQPLFAFEWRDPEKGNTGQLTWTRLPQGFKNSPTLFNEALHRDLAPFRALNPQVVLLQYVDDLLVAAPTYRDCKEGTQKLLQELSKLGYRVSAKKAQLCQKEVTYLGYLLKEGKRWLTPARKATVMKIPPPTTPRQVREFLGTAGFCRLWIPGFASLAAPLYPLTKPSIPFIWTEEHQKAFDRIKEALLSAPALALPDLTKPFTLYVDERAGVARGVLTQTLGPWRRPVAYLSKKLDPVASGWPTCLKAVAAVALLLKDADKLTLGQNVTVIASHSLESIVRQPPDRWMTNARMTHYQSLLLNERVSFAPPAVLNPATLLPVESEATPVHRCSEILAEETGTRRDLKDQPLPGVPAWYTDGSSFIAEGKRRAGAAIVDGKRTVWASSLPEGTSAQKAELVALTQALRLAEGKDINIYTDSRYAFATAHIHGAIYKQRGWLTSAGKDIKNKEEILALLEAIHLPKRVAIIHCPGHQKGNDPVATGNRRADEAAKQAALSTRVLAETTKPAGKRTADGSEFEKRTADGSEFESPKKKAKVE

SEQ ID NO: 7350 - protein, 2096 aa, synthetic construct
MPAAKRVKLDGGDKKYSIGLDIGTNSVGWAVITDEYKVPSKKFKVLGNTDRHSIKKNLIGALLFDSGETAEATRLKRTARRRYTRRKNRICYLQEIFSNEMAKVDDSFFHRLEESFLVEEDKKHERHPIFGNIVDEVAYHEKYPTIYHLRKKLVDSTDKADLRLIYLALAHMIKFRGHFLIEGDLNPDNSDVDKLFIQLVQTYNQLFEENPINASGVDAKAILSARLSKSRRLENLIAQLPGEKKNGLFGNLIALSLGLTPNFKSNFDLAEDAKLQLSKDTYDDDLDNLLAQIGDQYADLFLAAKNLSDAILLSDILRVNTEITKAPLSASMIKRYDEHHQDLTLLKALVRQQLPEKYKEIFFDQSKNGYAGYIDGGASQEEFYKFIKPILEKMDGTEELLVKLNREDLLRKQRTFDNGSIPHQIHLGELHAILRRQEDFYPFLKDNREKIEKILTFRIPYYVGPLARGNSRFAWMTRKSEETITPWNFEEVVDKGASAQSFIERMTNFDKNLPNEKVLPKHSLLYEYFTVYNELTKVKYVTEGMRKPAFLSGEQKKAIVDLLFKTNRKVTVKQLKEDYFKKIECFDSVEISGVEDRFNASLGTYHDLLKIIKDKDFLDNEENEDILEDIVLTLTLFEDREMIEERLKTYAHLFDDKVMKQLKRRRYTGWGRLSRKLINGIRDKQSGKTILDFLKSDGFANRNFMQLIHDDSLTFKEDIQKAQVSGQGDSLHEHIANLAGSPAIKKGILQTVKVVDELVKVMGRHKPENIVIEMARENQTTQKGQKNSRERMKRIEEGIKELGSQILKEHPVENTQLQNEKLYLYYLQNGRDMYVDQELDINRLSDYDVDHIVPQSFLKDDSIDNKVLTRSDKARGKSDNVPSEEVVKKMKNYWRQLLNAKLITQRKFDNLTKAERGGLSELDKAGFIKRQLVETRQITKHVAQILDSRMNTKYDENDKLIREVKVITLKSKLVSDFRKDFQFYKVREINNYHHAHDAYLNAVVGTALIKKYPKLESEFVYGDYKVYDVRKMIAKSEQEIGKATAKYFFYSNIMNFFKTEITLANGEIRKRPLIETNGETGEIVWDKGRDFATVRKVLSMPQVNIVKKTEVQTGGFSKESILPKRNSDKLIARKKDWDPKKYGGFDSPTVAYSVLVVAKVEKGKSKKLKSVKELLGITIMERSSFEKNPIDFLEAKGYKEVKKDLIIKLPKYSLFELENGRKRMLASAGELQKGNELALPSKYVNFLYLASHYEKLKGSPEDNEQKQLFVEQHKHYLDEIIEQISEFSKRVILADANLDKVLSAYNKHRDKPIREQAENIIHLFTLTNLGAPAAFKYFDTTIDRKRYTSTKEVLDATLIHQSITGLYETRIDLSQLGGDGGEAAAKGSSGGGGGTLNIEDEYRLHETSKEPDVPLGSTWLSDFPQAWAETGGMGLAVRQAPLIIPLKATSTPVSIKQYPMSQEARLGIKPHIQRLLDQGILVPCQSPWNTPLLPVKKPGTNDYRPVQDLREVNKRVEDIHPTVPNPYNLLSGLPPSHQWYTVLDLKDAFFCLRLHPTSQPLFAFEWRDPEMGISGQLTWTRLPQGFKNSPTLFNEALHRDLADFRIQHPDLILLQYVDDLLLAATSEQDCQRGTRALLQTLGNLGYRASAKKAQICQKQVKYLGYLLKEGQRWLTEARKETVMGQPTPKTPRQLREFLGTAGFCRLWIPGFAEMAAPLYPLTKPGTLFNWGPDQQKAYQEIKQALLTAPALGLPDLTKPFELFVDEKQGYAKGVLTQKLGPWRRPVAYLSKKLDPVAAGWPPCLRMVAAIAVLTKDAGKLTMGQPLVILAPHAVEALVKQPPDRWLSNARMTHYQAMLLDTDRVQFGPVVALNPATLLPLPEKEAPHDCLEILAETHGTRPDLTDQPIPDADYTWYTDGSSFLQEGQRRAGAAVTTETEVIWARALPAGTSAQRAELIALTQALKMAEGKKLNVYTDSRYAFATAHVHGEIYRRRGWLTSEGREIKNKNEILALLKALFLPKRLSIIHCPGHQKGNSAEARGNRMADQAAREAAMKAVLETSTLLAGKRTADGSEFEKRTADGSEFESPKKKAKVE

SEQ ID NO: 7351 - protein, 2096 aa, synthetic construct
MPAAKRVKLDGGDKKYSIGLDIGTNSVGWAVITDEYKVPSKKFKVLGNTDRHSIKKNLIGALLFDSGETAEATRLKRTARRRYTRRKNRICYLQEIFSNEMAKVDDSFFHRLEESFLVEEDKKHERHPIFGNIVDEVAYHEKYPTIYHLRKKLVDSTDKADLRLIYLALAHMIKFRGHFLIEGDLNPDNSDVDKLFIQLVQTYNQLFEENPINASGVDAKAILSARLSKSRRLENLIAQLPGEKKNGLFGNLIALSLGLTPNFKSNFDLAEDAKLQLSKDTYDDDLDNLLAQIGDQYADLFLAAKNLSDAILLSDILRVNTEITKAPLSASMIKRYDEHHQDLTLLKALVRQQLPEKYKEIFFDQSKNGYAGYIDGGASQEEFYKFIKPILEKMDGTEELLVKLNREDLLRKQRTFDNGSIPHQIHLGELHAILRRQEDFYPFLKDNREKIEKILTFRIPYYVGPLARGNSRFAWMTRKSEETITPWNFEEVVDKGASAQSFIERMTNFDKNLPNEKVLPKHSLLYEYFTVYNELTKVKYVTEGMRKPAFLSGEQKKAIVDLLFKTNRKVTVKQLKEDYFKKIECFDSVEISGVEDRFNASLGTYHDLLKIIKDKDFLDNEENEDILEDIVLTLTLFEDREMIEERLKTYAHLFDDKVMKQLKRRRYTGWGRLSRKLINGIRDKQSGKTILDFLKSDGFANRNFMQLIHDDSLTFKEDIQKAQVSGQGDSLHEHIANLAGSPAIKKGILQTVKVVDELVKVMGRHKPENIVIEMARENQTTQKGQKNSRERMKRIEEGIKELGSQILKEHPVENTQLQNEKLYLYYLQNGRDMYVDQELDINRLSDYDVDHIVPQSFLKDDSIDNKVLTRSDKARGKSDNVPSEEVVKKMKNYWRQLLNAKLITQRKFDNLTKAERGGLSELDKAGFIKRQLVETRQITKHVAQILDSRMNTKYDENDKLIREVKVITLKSKLVSDFRKDFQFYKVREINNYHHAHDAYLNAVVGTALIKKYPKLESEFVYGDYKVYDVRKMIAKSEQEIGKATAKYFFYSNIMNFFKTEITLANGEIRKRPLIETNGETGEIVWDKGRDFATVRKVLSMPQVNIVKKTEVQTGGFSKESILPKRNSDKLIARKKDWDPKKYGGFDSPTVAYSVLVVAKVEKGKSKKLKSVKELLGITIMERSSFEKNPIDFLEAKGYKEVKKDLIIKLPKYSLFELENGRKRMLASAGELQKGNELALPSKYVNFLYLASHYEKLKGSPEDNEQKQLFVEQHKHYLDEIIEQISEFSKRVILADANLDKVLSAYNKHRDKPIREQAENIIHLFTLTNLGAPAAFKYFDTTIDRKRYTSTKEVLDATLIHQSITGLYETRIDLSQLGGDGGGGGGSSPAPGGTAPLEEEYRLFLEAPIQNVTLLEQWKREIPKVWAEINPPGLASTQAPIHVQLLSTALPVRVRQYPITLEAKRSLRETIRKFRAAGILRPVHSPWNTPLLPVRKSGTSEYRMVQDLREVNKRVETIHPTVPNPYTLLSLLPPDRIWYSVLDLKDAFFCIPLAPESQLIFAFEWADAEEGESGQLTWTRLPQGFKNSPTLFNEALNRDLQGFRLDHPSVSLLQYVDDLLIAADTQAACLSATRDLLMTLAELGYRVSGKKAQLCQEEVTYLGFKIHKGSRSLSNSRTQAILQIPVPKTKRQVREFLGKIGYCRLFIPGFAELAQPLYAATRPGNDPLVWGEKEEEAFQSLKLALTQPPALALPSLDKPFQLFVEETSGAAKGVLTQALGPWKRPVAYLSKRLDPVAAGWPRCLRAIAAAALLTREASKLTFGQDIEITSSHNLESLLRSPPDKWLTNARITQYQVLLLDPPRVRFKQTAALNPATLLPETDDTLPIHHCLDTLDSLTSTRPDLTDQPLAQAEATLFTDGSSYIRDGKRYAGAAVVTLDSVIWAEPLPIGTSAQKAELIALTKALEWSKDKSVNIYTDSRYAFATLHVHGMIYRERGWLTAGGKAIKNAPEILALLTAVWLPKRVAVMHCKGHQKDDAPTSTGNRRADEVAREVAIRPLSTQATISAGKRTADGSEFEKRTADGSEFESPKKKAKVE

SEQ ID NO: 7352 - protein, 2093 aa, synthetic construct
MPAAKRVKLDGGDKKYSIGLDIGTNSVGWAVITDEYKVPSKKFKVLGNTDRHSIKKNLIGALLFDSGETAEATRLKRTARRRYTRRKNRICYLQEIFSNEMAKVDDSFFHRLEESFLVEEDKKHERHPIFGNIVDEVAYHEKYPTIYHLRKKLVDSTDKADLRLIYLALAHMIKFRGHFLIEGDLNPDNSDVDKLFIQLVQTYNQLFEENPINASGVDAKAILSARLSKSRRLENLIAQLPGEKKNGLFGNLIALSLGLTPNFKSNFDLAEDAKLQLSKDTYDDDLDNLLAQIGDQYADLFLAAKNLSDAILLSDILRVNTEITKAPLSASMIKRYDEHHQDLTLLKALVRQQLPEKYKEIFFDQSKNGYAGYIDGGASQEEFYKFIKPILEKMDGTEELLVKLNREDLLRKQRTFDNGSIPHQIHLGELHAILRRQEDFYPFLKDNREKIEKILTFRIPYYVGPLARGNSRFAWMTRKSEETITPWNFEEVVDKGASAQSFIERMTNFDKNLPNEKVLPKHSLLYEYFTVYNELTKVKYVTEGMRKPAFLSGEQKKAIVDLLFKTNRKVTVKQLKEDYFKKIECFDSVEISGVEDRFNASLGTYHDLLKIIKDKDFLDNEENEDILEDIVLTLTLFEDREMIEERLKTYAHLFDDKVMKQLKRRRYTGWGRLSRKLINGIRDKQSGKTILDFLKSDGFANRNFMQLIHDDSLTFKEDIQKAQVSGQGDSLHEHIANLAGSPAIKKGILQTVKVVDELVKVMGRHKPENIVIEMARENQTTQKGQKNSRERMKRIEEGIKELGSQILKEHPVENTQLQNEKLYLYYLQNGRDMYVDQELDINRLSDYDVDHIVPQSFLKDDSIDNKVLTRSDKARGKSDNVPSEEVVKKMKNYWRQLLNAKLITQRKFDNLTKAERGGLSELDKAGFIKRQLVETRQITKHVAQILDSRMNTKYDENDKLIREVKVITLKSKLVSDFRKDFQFYKVREINNYHHAHDAYLNAVVGTALIKKYPKLESEFVYGDYKVYDVRKMIAKSEQEIGKATAKYFFYSNIMNFFKTEITLANGEIRKRPLIETNGETGEIVWDKGRDFATVRKVLSMPQVNIVKKTEVQTGGFSKESILPKRNSDKLIARKKDWDPKKYGGFDSPTVAYSVLVVAKVEKGKSKKLKSVKELLGITIMERSSFEKNPIDFLEAKGYKEVKKDLIIKLPKYSLFELENGRKRMLASAGELQKGNELALPSKYVNFLYLASHYEKLKGSPEDNEQKQLFVEQHKHYLDEIIEQISEFSKRVILADANLDKVLSAYNKHRDKPIREQAENIIHLFTLTNLGAPAAFKYFDTTIDRKRYTSTKEVLDATLIHQSITGLYETRIDLSQLGGDGGGGGGSSPAPGGTLQLEEEYRLFEPESTQKQEMDIWLKNFPQAWAETGGMGTAHCQAPVLIQLKATATPISIRQYPMPHEAYQGIKPHIRRMLDQGILKPCQSPWNTPLLPVKKPGTEDYRPVQDLREVNKRVEDIHPTVPNPYNLLSTLPPSHPWYTVLDLKDAFFCLRLHSESQLLFAFEWRDPEIGLSGQLTWTRLPQGFKNSPTLFNEALHSDLADFRVRYPALVLLQYVDDLLLAAATRTECLEGTKALLETLGNKGYRASAKKAQICLQEVTYLGYSLKDGQRWLTKARKEAILSIPVPKNSRQVREFLGKAGYCRLFIPGFAELAAPLYPLTRPGTLFQWGTEQQLAFEDIKKALLSSPALGLPDITKPFELFIDENSGFAKGVLVQKLGPWKRPVAYLSKKLDTVASGWPPCLRMVAAIAILVKDAGKLTLGQPLTILTSHPVEALVRQPPNKWLSNARMTHYQAMLLDAERVHFGPTVSLNPATLLPLPSGGNHHDCLQILAETHGTRPDLTDQPLPDADLTWYTDGSSFIRNGEREAGAAVTTESEVIWAAPLPPGTSAQRAELIALTQALKMAEGKKLTVYTDSRYAFATTHVHGEIYRRRGWLTSEGKEIKNKNEILALLEALFLPKRLSIIHCPGHQKGDSPQAKGNRLADDTAKKAATETHSSLTVLPAGKRTADGSEFEKRTADGSEFESPKKKAKVE

SEQ ID NO: 7353 - protein, 2216 aa, synthetic construct
MPAAKRVKLDGGDKKYSIGLDIGTNSVGWAVITDEYKVPSKKFKVLGNTDRHSIKKNLIGALLFDSGETAEATRLKRTARRRYTRRKNRICYLQEIFSNEMAKVDDSFFHRLEESFLVEEDKKHERHPIFGNIVDEVAYHEKYPTIYHLRKKLVDSTDKADLRLIYLALAHMIKFRGHFLIEGDLNPDNSDVDKLFIQLVQTYNQLFEENPINASGVDAKAILSARLSKSRRLENLIAQLPGEKKNGLFGNLIALSLGLTPNFKSNFDLAEDAKLQLSKDTYDDDLDNLLAQIGDQYADLFLAAKNLSDAILLSDILRVNTEITKAPLSASMIKRYDEHHQDLTLLKALVRQQLPEKYKEIFFDQSKNGYAGYIDGGASQEEFYKFIKPILEKMDGTEELLVKLNREDLLRKQRTFDNGSIPHQIHLGELHAILRRQEDFYPFLKDNREKIEKILTFRIPYYVGPLARGNSRFAWMTRKSEETITPWNFEEVVDKGASAQSFIERMTNFDKNLPNEKVLPKHSLLYEYFTVYNELTKVKYVTEGMRKPAFLSGEQKKAIVDLLFKTNRKVTVKQLKEDYFKKIECFDSVEISGVEDRFNASLGTYHDLLKIIKDKDFLDNEENEDILEDIVLTLTLFEDREMIEERLKTYAHLFDDKVMKQLKRRRYTGWGRLSRKLINGIRDKQSGKTILDFLKSDGFANRNFMQLIHDDSLTFKEDIQKAQVSGQGDSLHEHIANLAGSPAIKKGILQTVKVVDELVKVMGRHKPENIVIEMARENQTTQKGQKNSRERMKRIEEGIKELGSQILKEHPVENTQLQNEKLYLYYLQNGRDMYVDQELDINRLSDYDVDHIVPQSFLKDDSIDNKVLTRSDKARGKSDNVPSEEVVKKMKNYWRQLLNAKLITQRKFDNLTKAERGGLSELDKAGFIKRQLVETRQITKHVAQILDSRMNTKYDENDKLIREVKVITLKSKLVSDFRKDFQFYKVREINNYHHAHDAYLNAVVGTALIKKYPKLESEFVYGDYKVYDVRKMIAKSEQEIGKATAKYFFYSNIMNFFKTEITLANGEIRKRPLIETNGETGEIVWDKGRDFATVRKVLSMPQVNIVKKTEVQTGGFSKESILPKRNSDKLIARKKDWDPKKYGGFDSPTVAYSVLVVAKVEKGKSKKLKSVKELLGITIMERSSFEKNPIDFLEAKGYKEVKKDLIIKLPKYSLFELENGRKRMLASAGELQKGNELALPSKYVNFLYLASHYEKLKGSPEDNEQKQLFVEQHKHYLDEIIEQISEFSKRVILADANLDKVLSAYNKHRDKPIREQAENIIHLFTLTNLGAPAAFKYFDTTIDRKRYTSTKEVLDATLIHQSITGLYETRIDLSQLGGDGGGGGGSSPAPGGTLGDQGSRGSDPLPEPRVTLTVEGIPTEFLVNTGAEHSVLTKPMGKMGSKRTVVAGATGSKVYPWTTKRLLKIGQKQVTHSFLVIPECPAPLLGRDLLTKLKAQIQFSTEGPQVTWEDRPAMCLVLNLEEEYRLHEKPVPPSIDPSWLQLFPMVWAEKAGMGLANQVPPVVVELKSDASPVAVRQYPMSKEAREGIRPHIQRFLDLGILVPCQSPWNTPLLPVKKPGTNDYRPVQDLREVNKRVQDIHPTVPNPYNLLSSLPPSHTWYSVLDLKDAFFCLKLHPNSQPLFAFEWRDPEKGNTGQLTWTRLPQGFKNSPTLFDEALHRDLASFRALNPQVVMLQYVDDLLVAAPTYRDCKEGTRRLLQELSKLGYRVSAKKAQLCREEVTYLGYLLKGGKRWLTPARKATVMKIPTPTTPRQVREFLGTAGFCRLWIPGFASLAAPLYPLTREKVPFTWTEAHQEAFGRIKEALLSAPALALPDLTKPFALYVDEKEGVARGVLTQTLGPWRRPVAYLSKKLDPVASGWPTCLKAIAAVALLLKDADKLTLGQNVLVIAPHNLESIVRQPPDRWMTNARMTHYQSLLLNERVSFAPPAILNPATLLPVESDDTPIHICSEILAEETGTRPDLRDQPLPGVPAWYTDGSSFIMDGRRQAGAAIVDNKRTVWASNLPEGTSAQKAELIALTQALRLAEGKSINIYTDSRYAFATAHVHGAIYKQRGLLTSAGKDIKNKEEILALLEAIHLPKRVAIIHCPGHQRGTDPVATGNRKADEAAKQAAQSTRILTETTKNAGKRTADGSEFEKRTADGSEFESPKKKAKVE

SEQ ID NO: 7354 - protein, 2125 aa, synthetic construct
MPAAKRVKLDGGDKKYSIGLDIGTNSVGWAVITDEYKVPSKKFKVLGNTDRHSIKKNLIGALLFDSGETAEATRLKRTARRRYTRRKNRICYLQEIFSNEMAKVDDSFFHRLEESFLVEEDKKHERHPIFGNIVDEVAYHEKYPTIYHLRKKLVDSTDKADLRLIYLALAHMIKFRGHFLIEGDLNPDNSDVDKLFIQLVQTYNQLFEENPINASGVDAKAILSARLSKSRRLENLIAQLPGEKKNGLFGNLIALSLGLTPNFKSNFDLAEDAKLQLSKDTYDDDLDNLLAQIGDQYADLFLAAKNLSDAILLSDILRVNTEITKAPLSASMIKRYDEHHQDLTLLKALVRQQLPEKYKEIFFDQSKNGYAGYIDGGASQEEFYKFIKPILEKMDGTEELLVKLNREDLLRKQRTFDNGSIPHQIHLGELHAILRRQEDFYPFLKDNREKIEKILTFRIPYYVGPLARGNSRFAWMTRKSEETITPWNFEEVVDKGASAQSFIERMTNFDKNLPNEKVLPKHSLLYEYFTVYNELTKVKYVTEGMRKPAFLSGEQKKAIVDLLFKTNRKVTVKQLKEDYFKKIECFDSVEISGVEDRFNASLGTYHDLLKIIKDKDFLDNEENEDILEDIVLTLTLFEDREMIEERLKTYAHLFDDKVMKQLKRRRYTGWGRLSRKLINGIRDKQSGKTILDFLKSDGFANRNFMQLIHDDSLTFKEDIQKAQVSGQGDSLHEHIANLAGSPAIKKGILQTVKVVDELVKVMGRHKPENIVIEMARENQTTQKGQKNSRERMKRIEEGIKELGSQILKEHPVENTQLQNEKLYLYYLQNGRDMYVDQELDINRLSDYDVDHIVPQSFLKDDSIDNKVLTRSDKARGKSDNVPSEEVVKKMKNYWRQLLNAKLITQRKFDNLTKAERGGLSELDKAGFIKRQLVETRQITKHVAQILDSRMNTKYDENDKLIREVKVITLKSKLVSDFRKDFQFYKVREINNYHHAHDAYLNAVVGTALIKKYPKLESEFVYGDYKVYDVRKMIAKSEQEIGKATAKYFFYSNIMNFFKTEITLANGEIRKRPLIETNGETGEIVWDKGRDFATVRKVLSMPQVNIVKKTEVQTGGFSKESILPKRNSDKLIARKKDWDPKKYGGFDSPTVAYSVLVVAKVEKGKSKKLKSVKELLGITIMERSSFEKNPIDFLEAKGYKEVKKDLIIKLPKYSLFELENGRKRMLASAGELQKGNELALPSKYVNFLYLASHYEKLKGSPEDNEQKQLFVEQHKHYLDEIIEQISEFSKRVILADANLDKVLSAYNKHRDKPIREQAENIIHLFTLTNLGAPAAFKYFDTTIDRKRYTSTKEVLDATLIHQSITGLYETRIDLSQLGGDGGGGGGSSPAPGGLLGRDLLTKLKAQIQFSTEGPQVTWEDRPAMCLVLNLEEEYRLHEKPVPPSIDPSWLQLFPMVWAEKAGMGLANQVPPVVVELKSDASPVAVRQYPMSKEAREGIRPHIQRFLDLGILVPCQSPWNTPLLPVKKPGTNDYRPVQDLREVNKRVQDIHPTVPNPYNLLSSLPPSHTWYSVLDLKDAFFCLKLHPNSQPLFAFEWRDPEKGNTGQLTWTRLPQGFKNSPTLFNEALHRDLASFRALNPQVVMLQYVDDLLVAAPTYRDCKEGTRRLLQELSKLGYRVSAKKAQLCREEVTYLGYLLKGGKRWLTPARKATVMKIPTPTTPRQVREFLGTAGFCRLWIPGFASLAAPLYPLTRPKVPFTWTEAHQEAFGRIKEALLSAPALALPDLTKPFALYVDEKEGVARGVLTQTLGPWRRPVAYLSKKLDPVASGWPTCLKAIAAVALLLKDADKLTLGQNVLVIAPHNLESIVRQPPDRWMTNARMTHYQSLLLNERVSFAPPAILNPATLLPVESDDTPIHICSEILAEETGTRPDLRDQPLPGVPAWYTDGSSFIMDGRRQAGAAIVDNKRTVWASNLPEGTSAQKAELIALTQALRLAEGKSINIYTDSRYAFATAHVHGAIYKQRGWLTSAGKDIKNKEEILALLEAIHLPKRVAIIHCPGHQRGTDPVATGNRKADEAAKQAAQSTRILTETTKNAGKRTADGSEFEKRTADGSEFESPKKKAKVE

SEQ ID NO: 7355 - protein, 2216 aa, synthetic construct
MPAAKRVKLDGGDKKYSIGLDIGTNSVGWAVITDEYKVPSKKFKVLGNTDRHSIKKNLIGALLFDSGETAEATRLKRTARRRYTRRKNRICYLQEIFSNEMAKVDDSFFHRLEESFLVEEDKKHERHPIFGNIVDEVAYHEKYPTIYHLRKKLVDSTDKADLRLIYLALAHMIKFRGHFLIEGDLNPDNSDVDKLFIQLVQTYNQLFEENPINASGVDAKAILSARLSKSRRLENLIAQLPGEKKNGLFGNLIALSLGLTPNFKSNFDLAEDAKLQLSKDTYDDDLDNLLAQIGDQYADLFLAAKNLSDAILLSDILRVNTEITKAPLSASMIKRYDEHHQDLTLLKALVRQQLPEKYKEIFFDQSKNGYAGYIDGGASQEEFYKFIKPILEKMDGTEELLVKLNREDLLRKQRTFDNGSIPHQIHLGELHAILRRQEDFYPFLKDNREKIEKILTFRIPYYVGPLARGNSRFAWMTRKSEETITPWNFEEVVDKGASAQSFIERMTNFDKNLPNEKVLPKHSLLYEYFTVYNELTKVKYVTEGMRKPAFLSGEQKKAIVDLLFKTNRKVTVKQLKEDYFKKIECFDSVEISGVEDRFNASLGTYHDLLKIIKDKDFLDNEENEDILEDIVLTLTLFEDREMIEERLKTYAHLFDDKVMKQLKRRRYTGWGRLSRKLINGIRDKQSGKTILDFLKSDGFANRNFMQLIHDDSLTFKEDIQKAQVSGQGDSLHEHIANLAGSPAIKKGILQTVKVVDELVKVMGRHKPENIVIEMARENQTTQKGQKNSRERMKRIEEGIKELGSQILKEHPVENTQLQNEKLYLYYLQNGRDMYVDQELDINRLSDYDVDHIVPQSFLKDDSIDNKVLTRSDKARGKSDNVPSEEVVKKMKNYWRQLLNAKLITQRKFDNLTKAERGGLSELDKAGFIKRQLVETRQITKHVAQILDSRMNTKYDENDKLIREVKVITLKSKLVSDFRKDFQFYKVREINNYHHAHDAYLNAVVGTALIKKYPKLESEFVYGDYKVYDVRKMIAKSEQEIGKATAKYFFYSNIMNFFKTEITLANGEIRKRPLIETNGETGEIVWDKGRDFATVRKVLSMPQVNIVKKTEVQTGGFSKESILPKRNSDKLIARKKDWDPKKYGGFDSPTVAYSVLVVAKVEKGKSKKLKSVKELLGITIMERSSFEKNPIDFLEAKGYKEVKKDLIIKLPKYSLFELENGRKRMLASAGELQKGNELALPSKYVNFLYLASHYEKLKGSPEDNEQKQLFVEQHKHYLDEIIEQISEFSKRVILADANLDKVLSAYNKHRDKPIREQAENIIHLFTLTNLGAPAAFKYFDTTIDRKRYTSTKEVLDATLIHQSITGLYETRIDLSQLGGDGGGGGGSSPAPGGTLGDQGSRGSDPLPEPRVTLTVEGIPTEFLVNTGAEHSVLTKPMGKMGSKRTVVAGATGSKVYPWTTKRLLKIGQKQVTHSFLVIPECPAPLLGRDLLTKLKAQIQFSTEGPQVTWEDRPAMCLVLNLEEEYRLHEKPVPPSIDPSWLQLFPMVWAEKAGMGLANQVPPVVVELKSDASPVAVRQYPMSKEAREGIRPHIQRFLDLGILVPCQSPWNTPLLPVKKPGTNDYRPVQDLREVNKRVQDIHPTVPNPYNLLSSLPPSHTWYSVLDLKDAFFCLKLHPNSQPLFAFEWRDPEKGNTGQLTWTRLPQGFKNSPTLFNEALHRDLASFRALNPQVVMLQYVDDLLVAAPTYRDCKEGTRRLLQELSKLGYRVSAKKAQLCREEVTYLGYLLKGGKRWLTPARKATVMKIPTPTTPRQVREFLGTAGFCRLWIPGFASLAAPLYPLTRPKVPFTWTEAHQEAFGRIKEALLSAPALALPDLTKPFALYVDEKEGVARGVLTQTLGPWRRPVAYLSKKLDPVASGWPTCLKAIAAVALLLKDADKLTLGQNVLVIAPHNLESIVRQPPDRWMTNARMTHYQSLLLNERVSFAPPAILNPATLLPVESDDTPIHICSEILAEETGTRPDLRDQPLPGVPAWYTDGSSFIMDGRRQAGAAIVDNKRTVWASNLPEGTSAQKAELIALTQALRLAEGKSINIYTDSRYAFATAHVHGAIYKQRGWLTSAGKDIKNKEEILALLEAIHLPKRVAIIHCPGHQRGTDPVATGNRKADEAAKQAAQSTRILTETTKNAGKRTADGSEFEKRTADGSEFESPKKKAKVE

SEQ ID NO: 7356 - protein, 2094 aa, synthetic construct
MPAAKRVKLDGGDKKYSIGLDIGTNSVGWAVITDEYKVPSKKFKVLGNTDRHSIKKNLIGALLFDSGETAEATRLKRTARRRYTRRKNRICYLQEIFSNEMAKVDDSFFHRLEESFLVEEDKKHERHPIFGNIVDEVAYHEKYPTIYHLRKKLVDSTDKADLRLIYLALAHMIKFRGHFLIEGDLNPDNSDVDKLFIQLVQTYNQLFEENPINASGVDAKAILSARLSKSRRLENLIAQLPGEKKNGLFGNLIALSLGLTPNFKSNFDLAEDAKLQLSKDTYDDDLDNLLAQIGDQYADLFLAAKNLSDAILLSDILRVNTEITKAPLSASMIKRYDEHHQDLTLLKALVRQQLPEKYKEIFFDQSKNGYAGYIDGGASQEEFYKFIKPILEKMDGTEELLVKLNREDLLRKQRTFDNGSIPHQIHLGELHAILRRQEDFYPFLKDNREKIEKILTFRIPYYVGPLARGNSRFAWMTRKSEETITPWNFEEVVDKGASAQSFIERMTNFDKNLPNEKVLPKHSLLYEYFTVYNELTKVKYVTEGMRKPAFLSGEQKKAIVDLLFKTNRKVTVKQLKEDYFKKIECFDSVEISGVEDRFNASLGTYHDLLKIIKDKDFLDNEENEDILEDIVLTLTLFEDREMIEERLKTYAHLFDDKVMKQLKRRRYTGWGRLSRKLINGIRDKQSGKTILDFLKSDGFANRNFMQLIHDDSLTFKEDIQKAQVSGQGDSLHEHIANLAGSPAIKKGILQTVKVVDELVKVMGRHKPENIVIEMARENQTTQKGQKNSRERMKRIEEGIKELGSQILKEHPVENTQLQNEKLYLYYLQNGRDMYVDQELDINRLSDYDVDHIVPQSFLKDDSIDNKVLTRSDKARGKSDNVPSEEVVKKMKNYWRQLLNAKLITQRKFDNLTKAERGGLSELDKAGFIKRQLVETRQITKHVAQILDSRMNTKYDENDKLIREVKVITLKSKLVSDFRKDFQFYKVREINNYHHAHDAYLNAVVGTALIKKYPKLESEFVYGDYKVYDVRKMIAKSEQEIGKATAKYFFYSNIMNFFKTEITLANGEIRKRPLIETNGETGEIVWDKGRDFATVRKVLSMPQVNIVKKTEVQTGGFSKESILPKRNSDKLIARKKDWDPKKYGGFDSPTVAYSVLVVAKVEKGKSKKLKSVKELLGITIMERSSFEKNPIDFLEAKGYKEVKKDLIIKLPKYSLFELENGRKRMLASAGELQKGNELALPSKYVNFLYLASHYEKLKGSPEDNEQKQLFVEQHKHYLDEIIEQISEFSKRVILADANLDKVLSAYNKHRDKPIREQAENIIHLFTLTNLGAPAAFKYFDTTIDRKRYTSTKEVLDATLIHQSITGLYETRIDLSQLGGDGGGGGGSSPAPGGTLNLEDEYRLYETSAEPEVSPGSTWLSDFPQAWAETGGMGLAVRQAPLIIPLKATSTPVSIKQYPMSQEAKLGIKPHIQRLLDQGILVPCQSPWNTPLLPVKKPGTNDYRPVQDLREVNKRVEDIHPTVPNPYNLLSGLPPSHRWYTVLDLKDAFFCLRLHPTSQPLFAFEWRDPGMGISGQLTWTRLPQGFKNSPTLFNEALHRDLADFRIQHPDLILLQYVDDILLAATSELDCQQGTRALLLTLGNLGYRASAKKAQLCQKQVKYLGYLLKEGQRWLTEARKETVMGQPTPKTPRQLREFLGTAGFCRLWIPGFAEMAAPLYPLTKPGTLFNWGPDQQKAYQEIKQALLTAPALGLPDLTKPFELFVDEKQGYAKGVLTQKLGPWRRPVAYLSKKLDPVAAGWPPCLRMVAAIAVLRKDAGKLTMGQPLVILAPHAVEALVKQPPDRWLSNARMTHYQAMLLDTDRVQFGPVVALNPATLLPLPEEGAPHDCLEILAETHGTRPDLTDQPIPDADHTWYTDGSSFLQEGQRKAGAAVTTETEVIWARALPAGTSAQRAELIALTQALKMAEGKRLNVYTDSRYAFATAHIHGEIYRRRGWLTSEGREIKNKSEILALLKALFLPKRLSIIHCLGHQKGDSAEARGNRLADQAAREAAIKTPPDTSTLLAGKRTADGSEFEKRTADGSEFESPKKKAKVE

SEQ ID NO: 7357 - protein, 2094 aa, synthetic construct
MPAAKRVKLDGGDKKYSIGLDIGTNSVGWAVITDEYKVPSKKFKVLGNTDRHSIKKNLIGALLFDSGETAEATRLKRTARRRYTRRKNRICYLQEIFSNEMAKVDDSFFHRLEESFLVEEDKKHERHPIFGNIVDEVAYHEKYPTIYHLRKKLVDSTDKADLRLIYLALAHMIKFRGHFLIEGDLNPDNSDVDKLFIQLVQTYNQLFEENPINASGVDAKAILSARLSKSRRLENLIAQLPGEKKNGLFGNLIALSLGLTPNFKSNFDLAEDAKLQLSKDTYDDDLDNLLAQIGDQYADLFLAAKNLSDAILLSDILRVNTEITKAPLSASMIKRYDEHHQDLTLLKALVRQQLPEKYKEIFFDQSKNGYAGYIDGGASQEEFYKFIKPILEKMDGTEELLVKLNREDLLRKQRTFDNGSIPHQIHLGELHAILRRQEDFYPFLKDNREKIEKILTFRIPYYVGPLARGNSRFAWMTRKSEETITPWNFEEVVDKGASAQSFIERMTNFDKNLPNEKVLPKHSLLYEYFTVYNELTKVKYVTEGMRKPAFLSGEQKKAIVDLLFKTNRKVTVKQLKEDYFKKIECFDSVEISGVEDRFNASLGTYHDLLKIIKDKDFLDNEENEDILEDIVLTLTLFEDREMIEERLKTYAHLFDDKVMKQLKRRRYTGWGRLSRKLINGIRDKQSGKTILDFLKSDGFANRNFMQLIHDDSLTFKEDIQKAQVSGQGDSLHEHIANLAGSPAIKKGILQTVKVVDELVKVMGRHKPENIVIEMARENQTTQKGQKNSRERMKRIEEGIKELGSQILKEHPVENTQLQNEKLYLYYLQNGRDMYVDQELDINRLSDYDVDHIVPQSFLKDDSIDNKVLTRSDKARGKSDNVPSEEVVKKMKNYWRQLLNAKLITQRKFDNLTKAERGGLSELDKAGFIKRQLVETRQITKHVAQILDSRMNTKYDENDKLIREVKVITLKSKLVSDFRKDFQFYKVREINNYHHAHDAYLNAVVGTALIKKYPKLESEFVYGDYKVYDVRKMIAKSEQEIGKATAKYFFYSNIMNFFKTEITLANGEIRKRPLIETNGETGEIVWDKGRDFATVRKVLSMPQVNIVKKTEVQTGGFSKESILPKRNSDKLIARKKDWDPKKYGGFDSPTVAYSVLVVAKVEKGKSKKLKSVKELLGITIMERSSFEKNPIDFLEAKGYKEVKKDLIIKLPKYSLFELENGRKRMLASAGELQKGNELALPSKYVNFLYLASHYEKLKGSPEDNEQKQLFVEQHKHYLDEIIEQISEFSKRVILADANLDKVLSAYNKHRDKPIREQAENIIHLFTLTNLGAPAAFKYFDTTIDRKRYTSTKEVLDATLIHQSITGLYETRIDLSQLGGDGGGGGGSSPAPGGLGIEDEYRLHETSTEPDVSLGSTWLSDFPQAWAETGGMGLAVRQAPLIIPLKATSTPVSIQQYPMSHEARLGIKPHIQRLLDQGILVPCQSPWNTPLLPVKKPGTNDYRPVQDLREVNKRVEDIHPTVPNPYNLLSGLPPSHQWYTVLDLKDAFFCLRLHPTSQPLFAFEWRDPGMGISGQLTWTRLPQGFKNSPTLFNEALHRDLADFRIQHPDLILLQYVDDILLAATSELDCQQGTRALLQTLGDLGYRASAKKAQICQKQVKYLGYLLREGQRWLTEARKETVMGQPVPKTPRQLREFLGKAGFCRLFIPGFAEMAAPLYPLTKPGTLFSWGPDQQKAYQEIKQALLTAPALGLPDLTKPFELFVDEKQGYAKGVLTQKLGPWRRPVAYLSKKLDPVAAGWPPCLRMVAAIAVLTKDAGKLTMGQPLVILAPHAVEALVKQPPDRWLSNARMTHYQAMLLDTDRVQFGPVVALNPATLLPLPEEGAPHDCLEILAETHGTRPDLTDQPIPDADHTWYTDGSSFLQEGQRKAGAAVTTETEVIWAGALPAGTSAQRAELIALTQALKMAEGKRLNVYTDSRYAFATAHIHGEIYRRRGWLTSEGREIKNKSEILALLKALFLPKRLSIIHCLGHQKGDSAEARGNRLADQAAREAAIKTPPDTSTLLIAGKRTADGSEFEKRTADGSEFESPKKKAKVE

SEQ ID NO: 7358 - protein, 2094 aa, synthetic construct; identical to SEQ ID NO: 7357

SEQ ID NO: 7359 - protein, 2094 aa, synthetic construct
MPAAKRVKLDGGDKKYSIGLDIGTNSVGWAVITDEYKVPSKKFKVLGNTDRHSIKKNLIGALLFDSGETAEATRLKRTARRRYTRRKNRICYLQEIFSNEMAKVDDSFFHRLEESFLVEEDKKHERHPIFGNIVDEVAYHEKYPTIYHLRKKLVDSTDKADLRLIYLALAHMIKFRGHFLIEGDLNPDNSDVDKLFIQLVQTYNQLFEENPINASGVDAKAILSARLSKSRRLENLIAQLPGEKKNGLFGNLIALSLGLTPNFKSNFDLAEDAKLQLSKDTYDDDLDNLLAQIGDQYADLFLAAKNLSDAILLSDILRVNTEITKAPLSASMIKRYDEHHQDLTLLKALVRQQLPEKYKEIFFDQSKNGYAGYIDGGASQEEFYKFIKPILEKMDGTEELLVKLNREDLLRKQRTFDNGSIPHQIHLGELHAILRRQEDFYPFLKDNREKIEKILTFRIPYYVGPLARGNSRFAWMTRKSEETITPWNFEEVVDKGASAQSFIERMTNFDKNLPNEKVLPKHSLLYEYFTVYNELTKVKYVTEGMRKPAFLSGEQKKAIVDLLFKTNRKVTVKQLKEDYFKKIECFDSVEISGVEDRFNASLGTYHDLLKIIKDKDFLDNEENEDILEDIVLTLTLFEDREMIEERLKTYAHLFDDKVMKQLKRRRYTGWGRLSRKLINGIRDKQSGKTILDFLKSDGFANRNFMQLIHDDSLTFKEDIQKAQVSGQGDSLHEHIANLAGSPAIKKGILQTVKVVDELVKVMGRHKPENIVIEMARENQTTQKGQKNSRERMKRIEEGIKELGSQILKEHPVENTQLQNEKLYLYYLQNGRDMYVDQELDINRLSDYDVDHIVPQSFLKDDSIDNKVLTRSDKARGKSDNVPSEEVVKKMKNYWRQLLNAKLITQRKFDNLTKAERGGLSELDKAGFIKRQLVETRQITKHVAQILDSRMNTKYDENDKLIREVKVITLKSKLVSDFRKDFQFYKVREINNYHHAHDAYLNAVVGTALIKKYPKLESEFVYGDYKVYDVRKMIAKSEQEIGKATAKYFFYSNIMNFFKTEITLANGEIRKRPLIETNGETGEIVWDKGRDFATVRKVLSMPQVNIVKKTEVQTGGFSKESILPKRNSDKLIARKKDWDPKKYGGFDSPTVAYSVLVVAKVEKGKSKKLKSVKELLGITIMERSSFEKNPIDFLEAKGYKEVKKDLIIKLPKYSLFELENGRKRMLASAGELQKGNELALPSKYVNFLYLASHYEKLKGSPEDNEQKQLFVEQHKHYLDEIIEQISEFSKRVILADANLDKVLSAYNKHRDKPIREQAENIIHLFTLTNLGAPAAFKYFDTTIDRKRYTSTKEVLDATLIHQSITGLYETRIDLSQLGGDGGGGGGSSPAPGGTLNIEDEYRLHETSKEPDVSLGSTWLSDFPQAWAETGGMGLAVRQAPLIIPLKATSTPVSIKQYPMSQEARLGIKPHIQRLLDQGILVPCQSPWNTPLLPVKKPGTNDYRPVQDLREVNKRVEDIHPTVPNPYNLLSGLPPSHQWYTVLDLKDAFFCLRLHPTSQPLFAFEWRDPEMGISGQLTWTRLPQGFKNSPTLFNEALHRDLAGFRIQHPDLILLQYVDDLLLAATSELDCQQGTRALLQTLGDLGYRASAKKAQICQKQVKYLGYLLKEGQRWLTEARKETVMGQPIPKTPRQLREFLGTAGFCRLWIPGFAEMAAPLYPLTKPGTLFNWGPDQQKAFQEIKQALLTAPALGLPDLTKPFELFVDEKQGYAKGVLTQKLGPWRRPVAYLSKKLDPVAAGWPPCLRMVAAIAVLTKDAGKLTMGQPLVILAPHAVEALVKQPPDRWLSNARMTHYQALLLDTDRVQFGPVVALNPATLLPLPEEGLQHDCLDILAEAHGTRSDLMDQPLPDADHTWYTDGSSFLQEGQRKAGAAVTTETEVIWARALPAGTSAQRAELIALTQALKMAEGKKLNVYTDSRYAFATAHIHGEIYRRRGWLTSEGKEIKNKDEILALLKALFLPKRLSIIHCPGHQKGNSAEARGNRMADQAAREVATRETPETSTLLAGKRTADGSEFEKRTADGSEFESPKKKAKVE

SEQ ID NO: 7360 - protein, 2094 aa, synthetic construct
MPAAKRVKLDGGDKKYSIGLDIGTNSVGWAVITDEYKVPSKKFKVLGNTDRHSIKKNLIGALLFDSGETAEATRLKRTARRRYTRRKNRICYLQEIFSNEMAKVDDSFFHRLEESFLVEEDKKHERHPIFGNIVDEVAYHEKYPTIYHLRKKLVDSTDKADLRLIYLALAHMIKFRGHFLIEGDLNPDNSDVDKLFIQLVQTYNQLFEENPINASGVDAKAILSARLSKSRRLENLIAQLPGEKKNGLFGNLIALSLGLTPNFKSNFDLAEDAKLQLSKDTYDDDLDNLLAQIGDQYADLFLAAKNLSDAILLSDILRVNTEITKAPLSASMIKRYDEHHQDLTLLKALVRQQLPEKYKEIFFDQSKNGYAGYIDGGASQEEFYKFIKPILEKMDGTEELLVKLNREDLLRKQRTFDNGSIPHQIHLGELHAILRRQEDFYPFLKDNREKIEKILTFRIPYYVGPLARGNSRFAWMTRKSEETITPWNFEEVVDKGASAQSFIERMTNFDKNLPNEKVLPKHSLLYEYFTVYNELTKVKYVTEGMRKPAFLSGEQKKAIVDLLFKTNRKVTVKQLKEDYFKKIECFDSVEISGVEDRFNASLGTYHDLLKIIKDKDFLDNEENEDILEDIVLTLTLFEDREMIEERLKTYAHLFDDKVMKQLKRRRYTGWGRLSRKLINGIRDKQSGKTILDFLKSDGFANRNFMQLIHDDSLTFKEDIQKAQVSGQGDSLHEHIANLAGSPAIKKGILQTVKVVDELVKVMGRHKPENIVIEMARENQTTQKGQKNSRERMKRIEEGIKELGSQILKEHPVENTQLQNEKLYLYYLQNGRDMYVDQELDINRLSDYDVDHIVPQSFLKDDSIDNKVLTRSDKARGKSDNVPSEEVVKKMKNYWRQLLNAKLITQRKFDNLTKAERGGLSELDKAGFIKRQLVETRQITKHVAQILDSRMNTKYDENDKLIREVKVITLKSKLVSDFRKDFQFYKVREINNYHHAHDAYLNAVVGTALIKKYPKLESEFVYGDYKVYDVRKMIAKSEQEIGKATAKYFFYSNIMNFFKTEITLANGEIRKRPLIETNGETGEIVWDKGRDFATVRKVLSMPQVNIVKKTEVQTGGFSKESILPKRNSDKLIARKKDWDPKKYGGFDSPTVAYSVLVVAKVEKGKSKKLKSVKELLGITIMERSSFEKNPIDFLEAKGYKEVKKDLIIKLPKYSLFELENGRKRMLASAGELQKGNELALPSKYVNFLYLASHYEKLKGSPEDNEQKQLFVEQHKHYLDEIIEQISEFSKRVILADANLDKVLSAYNKHRDKPIREQAENIIHLFTLTNLGAPAAFKYFDTTIDRKRYTSTKEVLDATLIHQSITGLYETRIDLSQLGGDGGGGGGSSPAPGGTLNIEDEYRLHETSKGPDVPLGSTWLSDFPQAWAETGGMGLAVRQAPLIIPLKATSTPVSIKQYPMSQEARLGIKPHIQRLLDQGILVPCQSPWNTPLLPVKKPGTNDYRPVQDLREVNKRVEDIHPTVPNPYNLLSGLPPSHQWYTVLDLKDAFFCLRLHPTSQSLFAFEWRDPEMGISGQLTWTRLPQGFKNSPTLFNEALHRDLADFRIQHPDLILLQYVDDLLLAATSELDCQQGTRALLQTLGDLGYRASAKKAQICQKQVKYLGYLLKEGQRWLTEARKETVMGQPTPKTPRQLREFLGTAGFCRLWIPGFAEMAAPLYPLTKPGTLFEWGPDQQKAYQEIKQALLTAPALGLPDLTKPFELFVDEKQGYAKGVLTQKLGPWRRPVAYLSKKLDPVAAGWPPCLRMVAAIAVLTKDAGKLTMGQPLVILAPHAVEALVKQPPDRWLSNARMTHYQALLLDTDRVQFGPIVALNPATLLPLPEEGLQHDCLDILAEAHGTRPDLTDQPLPDADHTWYTDGSSFLQEGQRKAGAAVTTETEVVWAKALPAGTSAQRAELIALTQALKMAEGKKLNVYTDSRYAFATAHIHGEIYRRRGWLTSEGKEIKNKDEILALLKALFLPKRLSIIHCPGHQKGNRAEARGNRMADQAAREVATRETPETSTLLAGKRTADGSEFEKRTADGSEFESPKKKAKVE

SEQ ID NO: 7361 - protein, 2088 aa, synthetic construct
MPAAKRVKLDGGDKKYSIGLDIGTNSVGWAVITDEYKVPSKKFKVLGNTDRHSIKKNLIGALLFDSGETAEATRLKRTARRRYTRRKNRICYLQEIFSNEMAKVDDSFFHRLEESFLVEEDKKHERHPIFGNIVDEVAYHEKYPTIYHLRKKLVDSTDKADLRLIYLALAHMIKFRGHFLIEGDLNPDNSDVDKLFIQLVQTYNQLFEENPINASGVDAKAILSARLSKSRRLENLIAQLPGEKKNGLFGNLIALSLGLTPNFKSNFDLAEDAKLQLSKDTYDDDLDNLLAQIGDQYADLFLAAKNLSDAILLSDILRVNTEITKAPLSASMIKRYDEHHQDLTLLKALVRQQLPEKYKEIFFDQSKNGYAGYIDGGASQEEFYKFIKPILEKMDGTEELLVKLNREDLLRKQRTFDNGSIPHQIHLGELHAILRRQEDFYPFLKDNREKIEKILTFRIPYYVGPLARGNSRFAWMTRKSEETITPWNFEEVVDKGASAQSFIERMTNFDKNLPNEKVLPKHSLLYEYFTVYNELTKVKYVTEGMRKPAFLSGEQKKAIVDLLFKTNRKVTVKQLKEDYFKKIECFDSVEISGVEDRFNASLGTYHDLLKIIKDKDFLDNEENEDILEDIVLTLTLFEDREMIEERLKTYAHLFDDKVMKQLKRRRYTGWGRLSRKLINGIRDKQSGKTILDFLKSDGFANRNFMQLIHDDSLTFKEDIQKAQVSGQGDSLHEHIANLAGSPAIKKGILQTVKVVDELVKVMGRHKPENIVIEMARENQTTQKGQKNSRERMKRIEEGIKELGSQILKEHPVENTQLQNEKLYLYYLQNGRDMYVDQELDINRLSDYDVDHIVPQSFLKDDSIDNKVLTRSDKARGKSDNVPSEEVVKKMKNYWRQLLNAKLITQRKFDNLTKAERGGLSELDKAGFIKRQLVETRQITKHVAQILDSRMNTKYDENDKLIREVKVITLKSKLVSDFRKDFQFYKVREINNYHHAHDAYLNAVVGTALIKKYPKLESEFVYGDYKVYDVRKMIAKSEQEIGKATAKYFFYSNIMNFFKTEITLANGEIRKRPLIETNGETGEIVWDKGRDFATVRKVLSMPQVNIVKKTEVQTGGFSKESILPKRNSDKLIARKKDWDPKKYGGFDSPTVAYSVLVVAKVEKGKSKKLKSVKELLGITIMERSSFEKNPIDFLEAKGYKEVKKDLIIKLPKYSLFELENGRKRMLASAGELQKGNELALPSKYVNFLYLASHYEKLKGSPEDNEQKQLFVEQHKHYLDEIIEQISEFSKRVILADANLDKVLSAYNKHRDKPIREQAENIIHLFTLTNLGAPAAFKYFDTTIDRKRYTSTKEVLDATLIHQSITGLYETRIDLSQLGGDGGGGGGSSPAPGGTLQLDDEYRLYSPLVKPDQNIQFWLEQFPQAWAETAGMGLAKQVPPQVIQLKASATPVSVRQYPLSKEAQEGIRPHVQRLIQQGILVPVQSPWNTPLLPVRKPGTNDYRPVQDLREVNKRVQDIHPTVPNPYNLLCALPPQRSWYTVLDLKDAFFCLRLHPTSQPLFAFEWRDPGTGRTGQLTWTRLPQGFKNSPTIFDEALHRDLANFRIQHPQVTLLQYVDDLLLAGATKQDCLEGTKALLLELSDLGYRASAKKAQICRREVTYLGYSLRDGQRWLTEARKKTVVQIPAPTTAKQVREFLGTAGFCRLWIPGFATLAAPLYPLTKEKGEFSWAPEHQKAFDAIKKALLSAPALALPDVTKPFTLYVDERKGVARGVLTQTLGPWRRPVAYLSKKLDPVASGWPVCLKAIAAVAILVKDADKLTLGQNITVIAPHALENIVRQPPDRWMTNARMTHYQSLLLTERVTFAPPAALNPATLLPEETDEPVTHDCHQLLIEETGVRKDLTDIPLTGEVLTWFTDGSSYVVEGKRMAGAAVVDGTRTIWASSLPEGTSAQKAELMALTQALRLAEGKSINIYTDSRYAFATAHVHGAIYKQRGLLTSAGREIKNKEEILSLLEALHLPKRLAIIHCPGHQKAKDPISRGNQMADRVAKQAAQGVNLLAGKRTADGSEFEKRTADGSEFESPKKKAKVE

SEQ ID NO: 7362 - protein, 2085 aa, synthetic construct
MPAAKRVKLDGGDKKYSIGLDIGTNSVGWAVITDEYKVPSKKFKVLGNTDRHSIKKNLIGALLFDSGETAEATRLKRTARRRYTRRKNRICYLQEIFSNEMAKVDDSFFHRLEESFLVEEDKKHERHPIFGNIVDEVAYHEKYPTIYHLRKKLVDSTDKADLRLIYLALAHMIKFRGHFLIEGDLNPDNSDVDKLFIQLVQTYNQLFEENPINASGVDAKAILSARLSKSRRLENLIAQLPGEKKNGLFGNLIALSLGLTPNFKSNFDLAEDAKLQLSKDTYDDDLDNLLAQIGDQYADLFLAAKNLSDAILLSDILRVNTEITKAPLSASMIKRYDEHHQDLTLLKALVRQQLPEKYKEIFFDQSKNGYAGYIDGGASQEEFYKFIKPILEKMDGTEELLVKLNREDLLRKQRTFDNGSIPHQIHLGELHAILRRQEDFYPFLKDNREKIEKILTFRIPYYVGPLARGNSRFAWMTRKSEETITPWNFEEVVDKGASAQSFIERMTNFDKNLPNEKVLPKHSLLYEYFTVYNELTKVKYVTEGMRKPAFLSGEQKKAIVDLLFKTNRKVTVKQLKEDYFKKIECFDSVEISGVEDRFNASLGTYHDLLKIIKDKDFLDNEENEDILEDIVLTLTLFEDREMIEERLKTYAHLFDDKVMKQLKRRRYTGWGRLSRKLINGIRDKQSGKTILDFLKSDGFANRNFMQLIHDDSLTFKEDIQKAQVSGQGDSLHEHIANLAGSPAIKKGILQTVKVVDELVKVMGRHKPENIVIEMARENQTTQKGQKNSRERMKRIEEGIKELGSQILKEHPVENTQLQNEKLYLYYLQNGRDMYVDQELDINRLSDYDVDHIVPQSFLKDDSIDNKVLTRSDKARGKSDNVPSEEVVKKMKNYWRQLLNAKLITQRKFDNLTKAERGGLSELDKAGFIKRQLVETRQITKHVAQILDSRMNTKYDENDKLIREVKVITLKSKLVSDFRKDFQFYKVREINNYHHAHDAYLNAVVGTALIKKYPKLESEFVYGDYKVYDVRKMIAKSEQEIGKATAKYFFYSNIMNFFKTEITLANGEIRKRPLIETNGETGEIVWDKGRDFATVRKVLSMPQVNIVKKTEVQTGGFSKESILPKRNSDKLIARKKDWDPKKYGGFDSPTVAYSVLVVAKVEKGKSKKLKSVKELLGITIMERSSFEKNPIDFLEAKGYKEVKKDLIIKLPKYSLFELENGRKRMLASAGELQKGNELALPSKYVNFLYLASHYEKLKGSPEDNEQKQLFVEQHKHYLDEIIEQISEFSKRVILADANLDKVLSAYNKHRDKPIREQAENIIHLFTLTNLGAPAAFKYFDTTIDRKRYTSTKEVLDATLIHQSITGLYETRIDLSQLGGDGGGGGGSSPAPGGIPWLMKKPLQLTTLVPLQEYEERLLKQTMLTGSYKEKLQSLFLKYDALWQHWENQVGHRRIKPHHIATGTVNPRPQKQYPINPKAKASIQTVINDLLKQGVLIQQNSIMNTPVYPVPKPDGKWRMVLDYREVNKTIPLIAAQNQHSAGILSSIFRGKYKTTLDLSNGFWAHSITPESYWLTAFTWLGQQYCWTRLPQGFLNSPALFNADVVDLLKEVPNVQVYVDDIYISHDDPREHLEQLEKVFSLLLNAGYVVSLKKSEIAQHEVEFLGFNITKEGRGLTETFKQKLLNITPPRDLKQLQSILGKLNFARNFIPNFSELVKPLYNIIATAPGKYITWTTDNSQQLQNIISMLNSAENLEERNPEVRLIMKVNTSPSAGYIRFYNEFAKRPIMYLNYVYTKAEVKFTNTEKLLTTIHKGLIKALDLGMGQEILVYSPIVSMTKIQKTPLPERKALPIRWITWMSYLEDPRIQFHYDKTLPELQQVPTVTDDIIAKIKHPSEFSMVFYTDGSAIKHPNVNKSHNAGMGIAQVQFKPEFTVINTWSIPLGDHTAQLAEVAAVEFACKKALKIDGPVLIVTDSFYVAESVNKELPYWQSNGFFNNKKKPLKHVSKWKSIADCIQLKPDIIIIHEKGHQPTASTFHTEGNNLADKLATQGSYVVNAGKRTADGSEFEKRTADGSEFESPKKKAKVE

SEQ ID NO: 7363 - protein, 2174 aa, synthetic construct
MPAAKRVKLDGGDKKYSIGLDIGTNSVGWAVITDEYKVPSKKFKVLGNTDRHSIKKNLIGALLFDSGETAEATRLKRTARRRYTRRKNRICYLQEIFSNEMAKVDDSFFHRLEESFLVEEDKKHERHPIFGNIVDEVAYHEKYPTIYHLRKKLVDSTDKADLRLIYLALAHMIKFRGHFLIEGDLNPDNSDVDKLFIQLVQTYNQLFEENPINASGVDAKAILSARLSKSRRLENLIAQLPGEKKNGLFGNLIALSLGLTPNFKSNFDLAEDAKLQLSKDTYDDDLDNLLAQIGDQYADLFLAAKNLSDAILLSDILRVNTEITKAPLSASMIKRYDEHHQDLTLLKALVRQQLPEKYKEIFFDQSKNGYAGYIDGGASQEEFYKFIKPILEKMDGTEELLVKLNREDLLRKQRTFDNGSIPHQIHLGELHAILRRQEDFYPFLKDNREKIEKILTFRIPYYVGPLARGNSRFAWMTRKSEETITPWNFEEVVDKGASAQSFIERMTNFDKNLPNEKVLPKHSLLYEYFTVYNELTKVKYVTEGMRKPAFLSGEQKKAIVDLLFKTNRKVTVKQLKEDYFKKIECFDSVEISGVEDRFNASLGTYHDLLKIIKDKDFLDNEENEDILEDIVLTLTLFEDREMIEERLKTYAHLFDDKVMKQLKRRRYTGWGRLSRKLINGIRDKQSGKTILDFLKSDGFANRNFMQLIHDDSLTFKEDIQKAQVSGQGDSLHEHIANLAGSPAIKKGILQTVKVVDELVKVMGRHKPENIVIEMARENQTTQKGQKNSRERMKRIEEGIKELGSQILKEHPVENTQLQNEKLYLYYLQNGRDMYVDQELDINRLSDYDVDHIVPQSFLKDDSIDNKVLTRSDKARGKSDNVPSEEVVKKMKNYWRQLLNAKLITQRKFDNLTKAERGGLSELDKAGFIKRQLVETRQITKHVAQILDSRMNTKYDENDKLIREVKVITLKSKLVSDFRKDFQFYKVREINNYHHAHDAYLNAVVGTALIKKYPKLESEFVYGDYKVYDVRKMIAKSEQEIGKATAKYFFYSNIMNFFKTEITLANGEIRKRPLIETNGETGEIVWDKGRDFATVRKVLSMPQVNIVKKTEVQTGGFSKESILPKRNSDKLIARKKDWDPKKYGGFDSPTVAYSVLVVAKVEKGKSKKLKSVKELLGITIMERSSFEKNPIDFLEAKGYKEVKKDLIIKLPKYSLFELENGRKRMLASAGELQKGNELALPSKYVNFLYLASHYEKLKGSPEDNEQKQLFVEQHKHYLDEIIEQISEFSKRVILADANLDKVLSAYNKHRDKPIREQAENIIHLFTLTNLGAPAAFKYFDTTIDRKRYTSTKEVLDATLIHQSITGLYETRIDLSQLGGDGGGGGGSSPAPGGMNPLQLLQPLPAEVKGTKLLAHWNSGATITCIPESFLEDEQPIKQTLIKTIHGEKQQNVYYLTFKVKGRKVEAEVIASPYEYILLSPTDVPWLTQQPLQLTILVPLQEYQDRILNKTALPEEQKQQLKALFTKYDNLWQHWENQVGHRKIRPHNIATGDYPPRPQKQYPINPKAKPSIQIVIDDLLKQGVLTPQNSTMNTPVYPVPKPDGRWRMVLDYREVNKTIPLTAAQNQHSAGILATIVRQKYKTTLDLANGFWAHPITPDSYWLTAFTWQGKQYCWTRLPQGFLNSPALFTADAVDLLKEVPNVQVYVDDIYLSHDNPHEHIQQLEKVFQILLQAGYVVSLKKSEIGQRTVEFLGFNITKEGRGLTDTFKTKLLNVTPPKDLKQLQSILGLLNFARNFIPNFAELVQTLYNLIASSKGKYIEWTEDNTKQLNKVIEALNTASNLEERLPDQRLVIKVNTSPSAGYVRYYNESGKKPIMYLNYVFSKAELKFSMLEKLLTTMHKALIKAMDLAMGQEILVYSPIVSMTKIQKTPLPERKALPIRWITWMTYLEDPRIQFHYDKTLPELKHIPDVYTSSIPPLKHPSQYEGVFCTDGSAIKSPDPTKSNNAGMGIVHAIYNPEYKILNQWSIPLGHHTAQMAEIAAVEFACKKALKVPGPVLVITDSFYVAESANKELPYWKSNGFVNNKKEPLKHISKWKSIAECLSIKPDITIQHEKGHQPINTSIHTEGNALADKLATQGSYVVNAGKRTADGSEFEKRTADGSEFESPKKKAKVE

SEQ ID NO: 7364 - protein, 2093 aa, synthetic construct
MPAAKRVKLDGGDKKYSIGLDIGTNSVGWAVITDEYKVPSKKFKVLGNTDRHSIKKNLIGALLFDSGETAEATRLKRTARRRYTRRKNRICYLQEIFSNEMAKVDDSFFHRLEESFLVEEDKKHERHPIFGNIVDEVAYHEKYPTIYHLRKKLVDSTDKADLRLIYLALAHMIKFRGHFLIEGDLNPDNSDVDKLFIQLVQTYNQLFEENPINASGVDAKAILSARLSKSRRLENLIAQLPGEKKNGLFGNLIALSLGLTPNFKSNFDLAEDAKLQLSKDTYDDDLDNLLAQIGDQYADLFLAAKNLSDAILLSDILRVNTEITKAPLSASMIKRYDEHHQDLTLLKALVRQQLPEKYKEIFFDQSKNGYAGYIDGGASQEEFYKFIKPILEKMDGTEELLVKLNREDLLRKQRTFDNGSIPHQIHLGELHAILRRQEDFYPFLKDNREKIEKILTFRIPYYVGPLARGNSRFAWMTRKSEETITPWNFEEVVDKGASAQSFIERMTNFDKNLPNEKVLPKHSLLYEYFTVYNELTKVKYVTEGMRKPAFLSGEQKKAIVDLLFKTNRKVTVKQLKEDYFKKIECFDSVEISGVEDRFNASLGTYHDLLKIIKDKDFLDNEENEDILEDIVLTLTLFEDREMIEERLKTYAHLFDDKVMKQLKRRRYTGWGRLSRKLINGIRDKQSGKTILDFLKSDGFANRNFMQLIHDDSLTFKEDIQKAQVSGQGDSLHEHIANLAGSPAIKKGILQTVKVVDELVKVMGRHKPENIVIEMARENQTTQKGQKNSRERMKRIEEGIKELGSQILKEHPVENTQLQNEKLYLYYLQNGRDMYVDQELDINRLSDYDVDHIVPQSFLKDDSIDNKVLTRSDKARGKSDNVPSEEVVKKMKNYWRQLLNAKLITQRKFDNLTKAERGGLSELDKAGFIKRQLVETRQITKHVAQILDSRMNTKYDENDKLIREVKVITLKSKLVSDFRKDFQFYKVREINNYHHAHDAYLNAVVGTALIKKYPKLESEFVYGDYKVYDVRKMIAKSEQEIGKATAKYFFYSNIMNFFKTEITLANGEIRKRPLIETNGETGEIVWDKGRDFATVRKVLSMPQVNIVKKTEVQTGGFSKESILPKRNSDKLIARKKDWDPKKYGGFDSPTVAYSVLVVAKVEKGKSKKLKSVKELLGITIMERSSFEKNPIDFLEAKGYKEVKKDLIIKLPKYSLFELENGRKRMLASAGELQKGNELALPSKYVNFLYLASHYEKLKGSPEDNEQKQLFVEQHKHYLDEIIEQISEFSKRVILADANLDKVLSAYNKHRDKPIREQAENIIHLFTLTNLGAPAAFKYFDTTIDRKRYTSTKEVLDATLIHQSITGLYETRIDLSQLGGDGGGGGPAPGSSGGTLQLEEEYRLFEPESTQKQEMDIWLKNFPQAWAETGGMGTAHCQAPVLIQLKATATPISIRQYPMPHEAYQGIKPHIRRMLDQGILKPCQSPWNTPLLPVKKPGTEDYRPVQDLREVNKRVEDIHPTVPNPYNLLSTLPPSHPWYTVLDLKDAFFCLRLHSESQLLFAFEWRDPEIGLSGQLTWTRLPQGFKNSPTLFNEALHSDLADFRVRYPALVLLQYVDDLLLAAATRTECLEGTKALLETLGNKGYRASAKKAQICLQEVTYLGYSLKDGQRWLTKARKEAILSIPVPKNSRQVREFLGTAGYCRLWIPGFAELAAPLYPLTRPGTLFQWGTEQQLAFEDIKKALLSSPALGLPDITKPFELFIDENSGFAKGVLVQKLGPWKRPVAYLSKKLDTVASGWPPCLRMVAAIAILVKDAGKLTLGQPLTILTSHPVEALVRQPPNKWLSNARMTHYQAMLLDAERVHFGPTVSLNPATLLPLPSGGNHHDCLQILAETHGTRPDLTDQPLPDADLTWYTDGSSFIRNGEREAGAAVTTESEVIWAAPLPPGTSAQRAELIALTQALKMAEGKKLTVYTDSRYAFATTHVHGEIYRRRGWLTSEGKEIKNKNEILALLEALFLPKRLSIIHCPGHQKGDSPQAKGNRLADDTAKKAATETHSSLTVLPAGKRTADGSEFEKRTADGSEFESPKKKAKVE

SEQ ID NO: 7365 - protein, 2093 aa, synthetic construct
MPAAKRVKLDGGDKKYSIGLDIGTNSVGWAVITDEYKVPSKKFKVLGNTDRHSIKKNLIGALLFDSGETAEATRLKRTARRRYTRRKNRICYLQEIFSNEMAKVDDSFFHRLEESFLVEEDKKHERHPIFGNIVDEVAYHEKYPTIYHLRKKLVDSTDKADLRLIYLALAHMIKFRGHFLIEGDLNPDNSDVDKLFIQLVQTYNQLFEENPINASGVDAKAILSARLSKSRRLENLIAQLPGEKKNGLFGNLIALSLGLTPNFKSNFDLAEDAKLQLSKDTYDDDLDNLLAQIGDQYADLFLAAKNLSDAILLSDILRVNTEITKAPLSASMIKRYDEHHQDLTLLKALVRQQLPEKYKEIFFDQSKNGYAGYIDGGASQEEFYKFIKPILEKMDGTEELLVKLNREDLLRKQRTFDNGSIPHQIHLGELHAILRRQEDFYPFLKDNREKIEKILTFRIPYYVGPLARGNSRFAWMTRKSEETITPWNFEEVVDKGASAQSFIERMTNFDKNLPNEKVLPKHSLLYEYFTVYNELTKVKYVTEGMRKPAFLSGEQKKAIVDLLFKTNRKVTVKQLKEDYFKKIECFDSVEISGVEDRFNASLGTYHDLLKIIKDKDFLDNEENEDILEDIVLTLTLFEDREMIEERLKTYAHLFDDKVMKQLKRRRYTGWGRLSRKLINGIRDKQSGKTILDFLKSDGFANRNFMQLIHDDSLTFKEDIQKAQVSGQGDSLHEHIANLAGSPAIKKGILQTVKVVDELVKVMGRHKPENIVIEMARENQTTQKGQKNSRERMKRIEEGIKELGSQILKEHPVENTQLQNEKLYLYYLQNGRDMYVDQELDINRLSDYDVDHIVPQSFLKDDSIDNKVLTRSDKARGKSDNVPSEEVVKKMKNYWRQLLNAKLITQRKFDNLTKAERGGLSELDKAGFIKRQLVETRQITKHVAQILDSRMNTKYDENDKLIREVKVITLKSKLVSDFRKDFQFYKVREINNYHHAHDAYLNAVVGTALIKKYPKLESEFVYGDYKVYDVRKMIAKSEQEIGKATAKYFFYSNIMNFFKTEITLANGEIRKRPLIETNGETGEIVWDKGRDFATVRKVLSMPQVNIVKKTEVQTGGFSKESILPKRNSDKLIARKKDWDPKKYGGFDSPTVAYSVLVVAKVEKGKSKKLKSVKELLGITIMERSSFEKNPIDFLEAKGYKEVKKDLIIKLPKYSLFELENGRKRMLASAGELQKGNELALPSKYVNFLYLASHYEKLKGSPEDNEQKQLFVEQHKHYLDEIIEQISEFSKRVILADANLDKVLSAYNKHRDKPIREQAENIIHLFTLTNLGAPAAFKYFDTTIDRKRYTSTKEVLDATLIHQSITGLYETRIDLSQLGGDGGGGGPAPGSSGGTLQLEEEYRLFEPESTQKQEMDIWLKNFPQAWAETGGMGTAHCQAPVLIQLKATATPISIRQYPMPHEAYQGIKPHIRRMLDQGILKPCQSPWNTPLLPVKKPGTEDYRPVQDLREVNKRVEDIHPTVPNPYNLLSTLPPSHPWYTVLDLKDAFFCLRLHSESQLLFAFEWRDPEIGLSGQLTWTRLPQGFKNSPTLFNEALHSDLADFRVRYPALVLLQYVDDLLLAAATRTECLEGTKALLETLGNKGYRASAKKAQICLQEVTYLGYSLKDGQRWLTKARKEAILSIPVPKNSRQVREFLGKAGYCRLFIPGFAELAAPLYPLTRPGTLFQWGTEQQLAFEDIKKALLSSPALGLPDITKPFELFIDENSGFAKGVLVQKLGPWKRPVAYLSKKLDTVASGWPPCLRMVAAIAILVKDAGKLTLGQPLTILTSHPVEALVRQPPNKWLSNARMTHYQAMLLDAERVHFGPTVSLNPATLLPLPSGGNHHDCLQILAETHGTRPDLTDQPLPDADLTWYTDGSSFIRNGEREAGAAVTTESEVIWAAPLPPGTSAQRAELIALTQALKMAEGKKLTVYTDSRYAFATTHVHGEIYRRRGWLTSEGKEIKNKNEILALLEALFLPKRLSIIHCPGHQKGDSPQAKGNRLADDTAKKAATETHSSLTVLPAGKRTADGSEFEKRTADGSEFESPKKKAKVE

SEQ ID NO: 7366 - protein, 2174 aa, synthetic construct
MPAAKRVKLDGGDKKYSIGLDIGTNSVGWAVITDEYKVPSKKFKVLGNTDRHSIKKNLIGALLFDSGETAEATRLKRTARRRYTRRKNRICYLQEIFSNEMAKVDDSFFHRLEESFLVEEDKKHERHPIFGNIVDEVAYHEKYPTIYHLRKKLVDSTDKADLRLIYLALAHMIKFRGHFLIEGDLNPDNSDVDKLFIQLVQTYNQLFEENPINASGVDAKAILSARLSKSRRLENLIAQLPGEKKNGLFGNLIALSLGLTPNFKSNFDLAEDAKLQLSKDTYDDDLDNLLAQIGDQYADLFLAAKNLSDAILLSDILRVNTEITKAPLSASMIKRYDEHHQDLTLLKALVRQQLPEKYKEIFFDQSKNGYAGYIDGGASQEEFYKFIKPILEKMDGTEELLVKLNREDLLRKQRTFDNGSIPHQIHLGELHAILRRQEDFYPFLKDNREKIEKILTFRIPYYVGPLARGNSRFAWMTRKSEETITPWNFEEVVDKGASAQSFIERMTNFDKNLPNEKVLPKHSLLYEYFTVYNELTKVKYVTEGMRKPAFLSGEQKKAIVDLLFKTNRKVTVKQLKEDYFKKIECFDSVEISGVEDRFNASLGTYHDLLKIIKDKDFLDNEENEDILEDIVLTLTLFEDREMIEERLKTYAHLFDDKVMKQLKRRRYTGWGRLSRKLINGIRDKQSGKTILDFLKSDGFANRNFMQLIHDDSLTFKEDIQKAQVSGQGDSLHEHIANLAGSPAIKKGILQTVKVVDELVKVMGRHKPENIVIEMARENQTTQKGQKNSRERMKRIEEGIKELGSQILKEHPVENTQLQNEKLYLYYLQNGRDMYVDQELDINRLSDYDVDHIVPQSFLKDDSIDNKVLTRSDKARGKSDNVPSEEVVKKMKNYWRQLLNAKLITQRKFDNLTKAERGGLSELDKAGFIKRQLVETRQITKHVAQILDSRMNTKYDENDKLIREVKVITLKSKLVSDFRKDFQFYKVREINNYHHAHDAYLNAVVGTALIKKYPKLESEFVYGDYKVYDVRKMIAKSEQEIGKATAKYFFYSNIMNFFKTEITLANGEIRKRPLIETNGETGEIVWDKGRDFATVRKVLSMPQVNIVKKTEVQTGGFSKESILPKRNSDKLIARKKDWDPKKYGGFDSPTVAYSVLVVAKVEKGKSKKLKSVKELLGITIMERSSFEKNPIDFLEAKGYKEVKKDLIIKLPKYSLFELENGRKRMLASAGELQKGNELALPSKYVNFLYLASHYEKLKGSPEDNEQKQLFVEQHKHYLDEIIEQISEFSKRVILADANLDKVLSAYNKHRDKPIREQAENIIHLFTLTNLGAPAAFKYFDTTIDRKRYTSTKEVLDATLIHQSITGLYETRIDLSQLGGDGGGGGPAPGSSGGMNPLQLLQPLPAEIKGTKLLAHWNSGATITCIPESFLEDEQPIKKTLIKTIHGEKQQNVYYVTFKVKGRKVEAEVIASPYEYILLSPTDVPWLTQQPLQLTILVPLQEYQEKILSKTALPEDQKQQLKTLFVKYDNLWQHWENQVGHRKIRPHNIATGDYPPRPQKQYPINPKAKPSIQIVIDDLLKQGVLTPQNSTMNTPVYPVPKPDGRWRMVLDYREVNKTIPLTAAQNQHSAGILATIVRQKYKTTLDLANGFWAHPITPESYWLTAFTWQGKQYCWTRLPQGFLNSPALFNADVVDLLKEIPNVQVYVDDIYLSHDDPKEHVQQLEKVFQILLQAGYVVSLKKSEIGQKTVEFLGFNITKEGRGLTDTFKTKLLNITPPKDLKQLQSILGLLNFARNFIPNFAELVQPLYNLIAPAKGKYIEWSEENTKQLNMVIEALNTASNLEERLPEQRLVIKVNTSPSAGYVRYYNETGKKPIMYLNYVFSKAELKFSMLEKLLTTMHKALIKAMDLAMGQEILVYSPIVSMTKIQKTPLPERKALPIRWITWMTYLEDPRIQFHYDKTLPELKHIPDVYTSSQSPVKHPSQYEGVFYTDGSAIKSPDPTKSNNAGMGIVHATYKPEYQVLNQWSIPLGNHTAQMAEIAAVEFACKKALKIPGPVLVITDSFYVAESANKELPYWKSNGFVNNKKKPLKHISKWKSIAECLSMKPDITIQHEKGISLQIPVFILKGNALADKLATQGSYVVNAGKRTADGSEFEKRTADGSEFESPKKKAKVE

SEQ ID NO: 7367 - protein, 2007 aa, synthetic construct
MPAAKRVKLDGGDKKYSIGLDIGTNSVGWAVITDEYKVPSKKFKVLGNTDRHSIKKNLIGALLFDSGETAEATRLKRTARRRYTRRKNRICYLQEIFSNEMAKVDDSFFHRLEESFLVEEDKKHERHPIFGNIVDEVAYHEKYPTIYHLRKKLVDSTDKADLRLIYLALAHMIKFRGHFLIEGDLNPDNSDVDKLFIQLVQTYNQLFEENPINASGVDAKAILSARLSKSRRLENLIAQLPGEKKNGLFGNLIALSLGLTPNFKSNFDLAEDAKLQLSKDTYDDDLDNLLAQIGDQYADLFLAAKNLSDAILLSDILRVNTEITKAPLSASMIKRYDEHHQDLTLLKALVRQQLPEKYKEIFFDQSKNGYAGYIDGGASQEEFYKFIKPILEKMDGTEELLVKLNREDLLRKQRTFDNGSIPHQIHLGELHAILRRQEDFYPFLKDNREKIEKILTFRIPYYVGPLARGNSRFAWMTRKSEETITPWNFEEVVDKGASAQSFIERMTNFDKNLPNEKVLPKHSLLYEYFTVYNELTKVKYVTEGMRKPAFLSGEQKKAIVDLLFKTNRKVTVKQLKEDYFKKIECFDSVEISGVEDRFNASLGTYHDLLKIIKDKDFLDNEENEDILEDIVLTLTLFEDREMIEERLKTYAHLFDDKVMKQLKRRRYTGWGRLSRKLINGIRDKQSGKTILDFLKSDGFANRNFMQLIHDDSLTFKEDIQKAQVSGQGDSLHEHIANLAGSPAIKKGILQTVKVVDELVKVMGRHKPENIVIEMARENQTTQKGQKNSRERMKRIEEGIKELGSQILKEHPVENTQLQNEKLYLYYLQNGRDMYVDQELDINRLSDYDVDHIVPQSFLKDDSIDNKVLTRSDKARGKSDNVPSEEVVKKMKNYWRQLLNAKLITQRKFDNLTKAERGGLSELDKAGFIKRQLVETRQITKHVAQILDSRMNTKYDENDKLIREVKVITLKSKLVSDFRKDFQFYKVREINNYHHAHDAYLNAVVGTALIKKYPKLESEFVYGDYKVYDVRKMIAKSEQEIGKATAKYFFYSNIMNFFKTEITLANGEIRKRPLIETNGETGEIVWDKGRDFATVRKVLSMPQVNIVKKTEVQTGGFSKESILPKRNSDKLIARKKDWDPKKYGGFDSPTVAYSVLVVAKVEKGKSKKLKSVKELLGITIMERSSFEKNPIDFLEAKGYKEVKKDLIIKLPKYSLFELENGRKRMLASAGELQKGNELALPSKYVNFLYLASHYEKLKGSPEDNEQKQLFVEQHKHYLDEIIEQISEFSKRVILADANLDKVLSAYNKHRDKPIREQAENIIHLFTLTNLGAPAAFKYFDTTIDRKRYTSTKEVLDATLIHQSITGLYETRIDLSQLGGDGGGGGPAPGSSGGGLEHLPPPPEVSQFPLNPERLQALTDLVSRALEAKHIEPYQGPGNNPIFPVKKPNGKWRFIHDLRATNSLTRDLASPSPGPPDLTSLPQDLPHLRTIDLTDAFFQIPLPAVFQPYFAFTLPQPNNHGPGTRYSWRVLPQGFKNSPTLFQQQLSHILAPVRKAFPNSLIIQYMDDILLASPALRELTALTDKVTNALTKEGLPMSLEKTQATPGSIHFLGQVISPDCITYETLPSIHVKSIWSLAELQSMLGELQWVSKGTPVLRSSLHQLYLALRGHRDPRDTIELTSTQVQALKTIQKALALNCRSRLVSQLPILALIILRPTGTTAVLFQTKQKWPLVWLHTPHPATSLRPWGQLLANAIITLDKYSLQHYGQICKSFHHNISNQALTYYLHTSDQSSVAILLQHSHRFHNLGAQPSGPWRSLLQVPQIFQNIDVLRPPFIISPVVIDHAPCLFSDGATSKAAFILWDKQVIHQQVLPLPSTCSAQAGELFGLLAGLQKSKPWPALNIFLDSKFLIGHLRRMAWGAFLGPSTQCDLHARLFPLLQGKTVYVHHVRSHTLLQDPISRLNEATDALMLAPLLPLAGKRTADGSEFEKRTADGSEFESPKKKAKVE

SEQ ID NO: 7368 - protein, 2125 aa, synthetic construct
MPAAKRVKLDGGDKKYSIGLDIGTNSVGWAVITDEYKVPSKKFKVLGNTDRHSIKKNLIGALLFDSGETAEATRLKRTARRRYTRRKNRICYLQEIFSNEMAKVDDSFFHRLEESFLVEEDKKHERHPIFGNIVDEVAYHEKYPTIYHLRKKLVDSTDKADLRLIYLALAHMIKFRGHFLIEGDLNPDNSDVDKLFIQLVQTYNQLFEENPINASGVDAKAILSARLSKSRRLENLIAQLPGEKKNGLFGNLIALSLGLTPNFKSNFDLAEDAKLQLSKDTYDDDLDNLLAQIGDQYADLFLAAKNLSDAILLSDILRVNTEITKAPLSASMIKRYDEHHQDLTLLKALVRQQLPEKYKEIFFDQSKNGYAGYIDGGASQEEFYKFIKPILEKMDGTEELLVKLNREDLLRKQRTFDNGSIPHQIHLGELHAILRRQEDFYPFLKDNREKIEKILTFRIPYYVGPLARGNSRFAWMTRKSEETITPWNFEEVVDKGASAQSFIERMTNFDKNLPNEKVLPKHSLLYEYFTVYNELTKVKYVTEGMRKPAFLSGEQKKAIVDLLFKTNRKVTVKQLKEDYFKKIECFDSVEISGVEDRFNASLGTYHDLLKIIKDKDFLDNEENEDILEDIVLTLTLFEDREMIEERLKTYAHLFDDKVMKQLKRRRYTGWGRLSRKLINGIRDKQSGKTILDFLKSDGFANRNFMQLIHDDSLTFKEDIQKAQVSGQGDSLHEHIANLAGSPAIKKGILQTVKVVDELVKVMGRHKPENIVIEMARENQTTQKGQKNSRERMKRIEEGIKELGSQILKEHPVENTQLQNEKLYLYYLQNGRDMYVDQELDINRLSDYDVDHIVPQSFLKDDSIDNKVLTRSDKARGKSDNVPSEEVVKKMKNYWRQLLNAKLITQRKFDNLTKAERGGLSELDKAGFIKRQLVETRQITKHVAQILDSRMNTKYDENDKLIREVKVITLKSKLVSDFRKDFQFYKVREINNYHHAHDAYLNAVVGTALIKKYPKLESEFVYGDYKVYDVRKMIAKSEQEIGKATAKYFFYSNIMNFFKTEITLANGEIRKRPLIETNGETGEIVWDKGRDFATVRKVLSMPQVNIVKKTEVQTGGFSKESILPKRNSDKLIARKKDWDPKKYGGFDSPTVAYSVLVVAKVEKGKSKKLKSVKELLGITIMERSSFEKNPIDFLEAKGYKEVKKDLIIKLPKYSLFELENGRKRMLASAGELQKGNELALPSKYVNFLYLASHYEKLKGSPEDNEQKQLFVEQHKHYLDEIIEQISEFSKRVILADANLDKVLSAYNKHRDKPIREQAENIIHLFTLTNLGAPAAFKYFDTTIDRKRYTSTKEVLDATLIHQSITGLYETRIDLSQLGGDGGGGGPAPGSSGGLLGRDLLTKLKAQIQFSTEGPQVTWEDRPAMCLVLNLEEEYRLHEKPVPPSIDPSWLQLFPMVWAEKAGMGLANQVPPVVVELKSDASPVAVRQYPMSKEAREGIRPHIQRFLDLGILVPCQSPWNTPLLPVKKPGTNDYRPVQDLREVNKRVQDIHPTVPNPYNLLSSLPPSHTWYSVLDLKDAFFCLKLHPNSQPLFAFEWRDPEKGNTGQLTWTRLPQGFKNSPTLFNEALHRDLASFRALNPQVVMLQYVDDLLVAAPTYRDCKEGTRRLLQELSKLGYRVSAKKAQLCREEVTYLGYLLKGGKRWLTPARKATVMKIPTPTTPRQVREFLGTAGFCRLWIPGFASLAAPLYPLTRPKVPFTWTEAHQEAFGRIKEALLSAPALALPDLTKPFALYVDEKEGVARGVLTQTLGPWRRPVAYLSKKLDPVASGWPTCLKAIAAVALLLKDADKLTLGQNVLVIAPHNLESIVRQPPDRWMTNARMTHYQSLLLNERVSFAPPAILNPATLLPVESDDTPIHICSEILAEETGTRPDLRDQPLPGVPAWYTDGSSFIMDGRRQAGAAIVDNKRTVWASNLPEGTSAQKAELIALTQALRLAEGKSINIYTDSRYAFATAHVHGAIYKQRGWLTSAGKDIKNKEEILALLEAIHLPKRVAIIHCPGHQRGTDPVATGNRKADEAAKQAAQSTRILTETTKNAGKRTADGSEFEKRTADGSEFESPKKKAKVE

SEQ ID NO: 7369 - protein, 2125 aa, synthetic construct
MPAAKRVKLDGGDKKYSIGLDIGTNSVGWAVITDEYKVPSKKFKVLGNTDRHSIKKNLIGALLFDSGETAEATRLKRTARRRYTRRKNRICYLQEIFSNEMAKVDDSFFHRLEESFLVEEDKKHERHPIFGNIVDEVAYHEKYPTIYHLRKKLVDSTDKADLRLIYLALAHMIKFRGHFLIEGDLNPDNSDVDKLFIQLVQTYNQLFEENPINASGVDAKAILSARLSKSRRLENLIAQLPGEKKNGLFGNLIALSLGLTPNFKSNFDLAEDAKLQLSKDTYDDDLDNLLAQIGDQYADLFLAAKNLSDAILLSDILRVNTEITKAPLSASMIKRYDEHHQDLTLLKALVRQQLPEKYKEIFFDQSKNGYAGYIDGGASQEEFYKFIKPILEKMDGTEELLVKLNREDLLRKQRTFDNGSIPHQIHLGELHAILRRQEDFYPFLKDNREKIEKILTFRIPYYVGPLARGNSRFAWMTRKSEETITPWNFEEVVDKGASAQSFIERMTNFDKNLPNEKVLPKHSLLYEYFTVYNELTKVKYVTEGMRKPAFLSGEQKKAIVDLLFKTNRKVTVKQLKEDYFKKIECFDSVEISGVEDRFNASLGTYHDLLKIIKDKDFLDNEENEDILEDIVLTLTLFEDREMIEERLKTYAHLFDDKVMKQLKRRRYTGWGRLSRKLINGIRDKQSGKTILDFLKSDGFANRNFMQLIHDDSLTFKEDIQKAQVSGQGDSLHEHIANLAGSPAIKKGILQTVKVVDELVKVMGRHKPENIVIEMARENQTTQKGQKNSRERMKRIEEGIKELGSQILKEHPVENTQLQNEKLYLYYLQNGRDMYVDQELDINRLSDYDVDHIVPQSFLKDDSIDNKVLTRSDKARGKSDNVPSEEVVKKMKNYWRQLLNAKLITQRKFDNLTKAERGGLSELDKAGFIKRQLVETRQITKHVAQILDSRMNTKYDENDKLIREVKVITLKSKLVSDFRKDFQFYKVREINNYHHAHDAYLNAVVGTALIKKYPKLESEFVYGDYKVYDVRKMIAKSEQEIGKATAKYFFYSNIMNFFKTEITLANGEIRKRPLIETNGETGEIVWDKGRDFATVRKVLSMPQVNIVKKTEVQTGGFSKESILPKRNSDKLIARKKDWDPKKYGGFDSPTVAYSVLVVAKVEKGKSKKLKSVKELLGITIMERSSFEKNPIDFLEAKGYKEVKKDLIIKLPKYSLFELENGRKRMLASAGELQKGNELALPSKYVNFLYLASHYEKLKGSPEDNEQKQLFVEQHKHYLDEIIEQISEFSKRVILADANLDKVLSAYNKHRDKPIREQAENIIHLFTLTNLGAPAAFKYFDTTIDRKRYTSTKEVLDATLIHQSITGLYETRIDLSQLGGDGGGGGPAPGSSGGLLGRDLLTKLKAQIQFSTEGPQVTWEDRPAMCLVLNLEEEYRLHEKPVPPSIDPSWLQLFPMVWAEKAGMGLANQVPPVVVELKSDASPVAVRQYPMSKEAREGIRPHIQRFLDLGILVPCQSPWNTPLLPVKKPGTNDYRPVQDLREVNKRVQDIHPTVPNPYNLLSSLPPSHTWYSVLDLKDAFFCLKLHPNSQPLFAFEWRDPEKGNTGQLTWTRLPQGFKNSPTLFNEALHRDLASFRALNPQVVMLQYVDDLLVAAPTYRDCKEGTRRLLQELSKLGYRVSAKKAQLCREEVTYLGYLLKGGKRWLTPARKATVMKIPTPTTPRQVREFLGKAGFCRLFIPGFASLAAPLYPLTRPKVPFTWTEAHQEAFGRIKEALLSAPALALPDLTKPFALYVDEKEGVARGVLTQTLGPWRRPVAYLSKKLDPVASGWPTCLKAIAAVALLLKDADKLTLGQNVLVIAPHNLESIVRQPPDRWMTNARMTHYQSLLLNERVSFAPPAILNPATLLPVESDDTPIHICSEILAEETGTRPDLRDQPLPGVPAWYTDGSSFIMDGRRQAGAAIVDNKRTVWASNLPEGTSAQKAELIALTQALRLAEGKSINIYTDSRYAFATAHVHGAIYKQRGWLTSAGKDIKNKEEILALLEAIHLPKRVAIIHCPGHQRGTDPVATGNRKADEAAKQAAQSTRILTETTKNAGKRTADGSEFEKRTADGSEFESPKKKAKVE

SEQ ID NO: 7370 - protein, 2216 aa, synthetic construct
MPAAKRVKLDGGDKKYSIGLDIGTNSVGWAVITDEYKVPSKKFKVLGNTDRHSIKKNLIGALLFDSGETAEATRLKRTARRRYTRRKNRICYLQEIFSNEMAKVDDSFFHRLEESFLVEEDKKHERHPIFGNIVDEVAYHEKYPTIYHLRKKLVDSTDKADLRLIYLALAHMIKFRGHFLIEGDLNPDNSDVDKLFIQLVQTYNQLFEENPINASGVDAKAILSARLSKSRRLENLIAQLPGEKKNGLFGNLIALSLGLTPNFKSNFDLAEDAKLQLSKDTYDDDLDNLLAQIGDQYADLFLAAKNLSDAILLSDILRVNTEITKAPLSASMIKRYDEHHQDLTLLKALVRQQLPEKYKEIFFDQSKNGYAGYIDGGASQEEFYKFIKPILEKMDGTEELLVKLNREDLLRKQRTFDNGSIPHQIHLGELHAILRRQEDFYPFLKDNREKIEKILTFRIPYYVGPLARGNSRFAWMTRKSEETITPWNFEEVVDKGASAQSFIERMTNFDKNLPNEKVLPKHSLLYEYFTVYNELTKVKYVTEGMRKPAFLSGEQKKAIVDLLFKTNRKVTVKQLKEDYFKKIECFDSVEISGVEDRFNASLGTYHDLLKIIKDKDFLDNEENEDILEDIVLTLTLFEDREMIEERLKTYAHLFDDKVMKQLKRRRYTGWGRLSRKLINGIRDKQSGKTILDFLKSDGFANRNFMQLIHDDSLTFKEDIQKAQVSGQGDSLHEHIANLAGSPAIKKGILQTVKVVDELVKVMGRHKPENIVIEMARENQTTQKGQKNSRERMKRIEEGIKELGSQILKEHPVENTQLQNEKLYLYYLQNGRDMYVDQELDINRLSDYDVDHIVPQSFLKDDSIDNKVLTRSDKARGKSDNVPSEEVVKKMKNYWRQLLNAKLITQRKFDNLTKAERGGLSELDKAGFIKRQLVETRQITKHVAQILDSRMNTKYDENDKLIREVKVITLKSKLVSDFRKDFQFYKVREINNYHHAHDAYLNAVVGTALIKKYPKLESEFVYGDYKVYDVRKMIAKSEQEIGKATAKYFFYSNIMNFFKTEITLANGEIRKRPLIETNGETGEIVWDKGRDFATVRKVLSMPQVNIVKKTEVQTGGFSKESILPKRNSDKLIARKKDWDPKKYGGFDSPTVAYSVLVVAKVEKGKSKKLKSVKELLGITIMERSSFEKNPIDFLEAKGYKEVKKDLIIKLPKYSLFELENGRKRMLASAGELQKGNELALPSKYVNFLYLASHYEKLKGSPEDNEQKQLFVEQHKHYLDEIIEQISEFSKRVILADANLDKVLSAYNKHRDKPIREQAENIIHLFTLTNLGAPAAFKYFDTTIDRKRYTSTKEVLDATLIHQSITGLYETRIDLSQLGGDGGGGGPAPGSSGGTLGDQGSRGSDPLPEPRVTLTVEGIPTEFLVNTGAEHSVLTKPMGKMGSKRTVVAGATGSKVYPWTTKRLLKIGQKQVTHSFLVIPECPAPLLGRDLLTKLKAQIQFSTEGPQVTWEDRPAMCLVLNLEEEYRLHEKPVPPSIDPSWLQLFPMVWAEKAGMGLANQVPPVVVELKSDASPVAVRQYPMSKEAREGIRPHIQRFLDLGILVPCQSPWNTPLLPVKKPGTNDYRPVQDLREVNKRVQDIHPTVPNPYNLLSSLPPSHTWYSVLDLKDAFFCLKLHPNSQPLFAFEWRDPEKGNTGQLTWTRLPQGFKNSPTLFNEALHRDLASFRALNPQVVMLQYVDDLLVAAPTYRDCKEGTRRLLQELSKLGYRVSAKKAQLCREEVTYLGYLLKGGKRWLTPARKATVMKIPTPTTPRQVREFLGTAGFCRLWIPGFASLAAPLYPLTRPKVPFTWTEAHQEAFGRIKEALLSAPALALPDLTKPFALYVDEKEGVARGVLTQTLGPWRRPVAYLSKKLDPVASGWPTCLKAIAAVALLLKDADKLTLGQNVLVIAPHNLESIVRQPPDRWMTNARMTHYQSLLLNERVSFAPPAILNPATLLPVESDDTPIHICSEILAEETGTRPDLRDQPLPGVPAWYTDGSSFIMDGRRQAGAAIVDNKRTVWASNLPEGTSAQKAELIALTQALRLAEGKSINIYTDSRYAFATAHVHGAIYKQRGWLTSAGKDIKNKEEILALLEAIHLPKRVAIIHCPGHQRGTDPVATGNRKADEAAKQAAQSTRILTETTKNAGKRTADGSEFEKRTADGSEFESPKKKAKVE

SEQ ID NO: 7371 - protein, 2216 aa, synthetic construct
MPAAKRVKLDGGDKKYSIGLDIGTNSVGWAVITDEYKVPSKKFKVLGNTDRHSIKKNLIGALLFDSGETAEATRLKRTARRRYTRRKNRICYLQEIFSNEMAKVDDSFFHRLEESFLVEEDKKHERHPIFGNIVDEVAYHEKYPTIYHLRKKLVDSTDKADLRLIYLALAHMIKFRGHFLIEGDLNPDNSDVDKLFIQLVQTYNQLFEENPINASGVDAKAILSARLSKSRRLENLIAQLPGEKKNGLFGNLIALSLGLTPNFKSNFDLAEDAKLQLSKDTYDDDLDNLLAQIGDQYADLFLAAKNLSDAILLSDILRVNTEITKAPLSASMIKRYDEHHQDLTLLKALVRQQLPEKYKEIFFDQSKNGYAGYIDGGASQEEFYKFIKPILEKMDGTEELLVKLNREDLLRKQRTFDNGSIPHQIHLGELHAILRRQEDFYPFLKDNREKIEKILTFRIPYYVGPLARGNSRFAWMTRKSEETITPWNFEEVVDKGASAQSFIERMTNFDKNLPNEKVLPKHSLLYEYFTVYNELTKVKYVTEGMRKPAFLSGEQKKAIVDLLFKTNRKVTVKQLKEDYFKKIECFDSVEISGVEDRFNASLGTYHDLLKIIKDKDFLDNEENEDILEDIVLTLTLFEDREMIEERLKTYAHLFDDKVMKQLKRRRYTGWGRLSRKLINGIRDKQSGKTILDFLKSDGFANRNFMQLIHDDSLTFKEDIQKAQVSGQGDSLHEHIANLAGSPAIKKGILQTVKVVDELVKVMGRHKPENIVIEMARENQTTQKGQKNSRERMKRIEEGIKELGSQILKEHPVENTQLQNEKLYLYYLQNGRDMYVDQELDINRLSDYDVDHIVPQSFLKDDSIDNKVLTRSDKARGKSDNVPSEEVVKKMKNYWRQLLNAKLITQRKFDNLTKAERGGLSELDKAGFIKRQLVETRQITKHVAQILDSRMNTKYDENDKLIREVKVITLKSKLVSDFRKDFQFYKVREINNYHHAHDAYLNAVVGTALIKKYPKLESEFVYGDYKVYDVRKMIAKSEQEIGKATAKYFFYSNIMNFFKTEITLANGEIRKRPLIETNGETGEIVWDKGRDFATVRKVLSMPQVNIVKKTEVQTGGFSKESILPKRNSDKLIARKKDWDPKKYGGFDSPTVAYSVLVVAKVEKGKSKKLKSVKELLGITIMERSSFEKNPIDFLEAKGYKEVKKDLIIKLPKYSLFELENGRKRMLASAGELQKGNELALPSKYVNFLYLASHYEKLKGSPEDNEQKQLFVEQHKHYLDEIIEQISEFSKRVILADANLDKVLSAYNKHRDKPIREQAENIIHLFTLTNLGAPAAFKYFDTTIDRKRYTSTKEVLDATLIHQSITGLYETRIDLSQLGGDGGGGGPAPGSSGGTLGDQGSRGSDPLPEPRVTLTVEGIPTEFLVNTGAEHSVLTKPMGKMGSKRTVVAGATGSKVYPWTTKRLLKIGQKQVTHSFLVIPECPAPLLGRDLLTKLKAQIQFSTEGPQVTWEDRPAMCLVLNLEEEYRLHEKPVPPSIDPSWLQLFPMVWAEKAGMGLANQVPPVVVELKSDASPVAVRQYPMSKEAREGIRPHIQRFLDLGILVPCQSPWNTPLLPVKKPGTNDYRPVQDLREVNKRVQDIHPTVPNPYNLLSSLPPSHTWYSVLDLKDAFFCLKLHPNSQPLFAFEWRDPEKGNTGQLTWTRLPQGFKNSPTLFNEALHRDLASFRALNPQVVMLQYVDDLLVAAPTYRDCKEGTRRLLQELSKLGYRVSAKKAQLCREEVTYLGYLLKGGKRWLTPARKATVMKIPTPTTPRQVREFLGKAGFCRLFIPGFASLAAPLYPLTRPKVPFTWTEAHQEAFGRIKEALLSAPALALPDLTKPFALYVDEKEGVARGVLTQTLGPWRRPVAYLSKKLDPVASGWPTCLKAIAAVALLLKDADKLTLGQNVLVIAPHNLESIVRQPPDRWMTNARMTHYQSLLLNERVSFAPPAILNPATLLPVESDDTPIHICSEILAEETGTRPDLRDQPLPGVPAWYTDGSSFIMDGRRQAGAAIVDNKRTVWASNLPEGTSAQKAELIALTQALRLAEGKSINIYTDSRYAFATAHVHGAIYKQRGWLTSAGKDIKNKEEILALLEAIHLPKRVAIIHCPGHQRGTDPVATGNRKADEAAKQAAQSTRILTETTKNAGKRTADGSEFEKRTADGSEFESPKKKAKVE

SEQ ID NO: 7372 - protein, 2094 aa, synthetic construct
MPAAKRVKLDGGDKKYSIGLDIGTNSVGWAVITDEYKVPSKKFKVLGNTDRHSIKKNLIGALLFDSGETAEATRLKRTARRRYTRRKNRICYLQEIFSNEMAKVDDSFFHRLEESFLVEEDKKHERHPIFGNIVDEVAYHEKYPTIYHLRKKLVDSTDKADLRLIYLALAHMIKFRGHFLIEGDLNPDNSDVDKLFIQLVQTYNQLFEENPINASGVDAKAILSARLSKSRRLENLIAQLPGEKKNGLFGNLIALSLGLTPNFKSNFDLAEDAKLQLSKDTYDDDLDNLLAQIGDQYADLFLAAKNLSDAILLSDILRVNTEITKAPLSASMIKRYDEHHQDLTLLKALVRQQLPEKYKEIFFDQSKNGYAGYIDGGASQEEFYKFIKPILEKMDGTEELLVKLNREDLLRKQRTFDNGSIPHQIHLGELHAILRRQEDFYPFLKDNREKIEKILTFRIPYYVGPLARGNSRFAWMTRKSEETITPWNFEEVVDKGASAQSFIERMTNFDKNLPNEKVLPKHSLLYEYFTVYNELTKVKYVTEGMRKPAFLSGEQKKAIVDLLFKTNRKVTVKQLKEDYFKKIECFDSVEISGVEDRFNASLGTYHDLLKIIKDKDFLDNEENEDILEDIVLTLTLFEDREMIEERLKTYAHLFDDKVMKQLKRRRYTGWGRLSRKLINGIRDKQSGKTILDFLKSDGFANRNFMQLIHDDSLTFKEDIQKAQVSGQGDSLHEHIANLAGSPAIKKGILQTVKVVDELVKVMGRHKPENIVIEMARENQTTQKGQKNSRERMKRIEEGIKELGSQILKEHPVENTQLQNEKLYLYYLQNGRDMYVDQELDINRLSDYDVDHIVPQSFLKDDSIDNKVLTRSDKARGKSDNVPSEEVVKKMKNYWRQLLNAKLITQRKFDNLTKAERGGLSELDKAGFIKRQLVETRQITKHVAQILDSRMNTKYDENDKLIREVKVITLKSKLVSDFRKDFQFYKVREINNYHHAHDAYLNAVVGTALIKKYPKLESEFVYGDYKVYDVRKMIAKSEQEIGKATAKYFFYSNIMNFFKTEITLANGEIRKRPLIETNGETGEIVWDKGRDFATVRKVLSMPQVNIVKKTEVQTGGFSKESILPKRNSDKLIARKKDWDPKKYGGFDSPTVAYSVLVVAKVEKGKSKKLKSVKELLGITIMERSSFEKNPIDFLEAKGYKEVKKDLIIKLPKYSLFELENGRKRMLASAGELQKGNELALPSKYVNFLYLASHYEKLKGSPEDNEQKQLFVEQHKHYLDEIIEQISEFSKRVILADANLDKVLSAYNKHRDKPIREQAENIIHLFTLTNLGAPAAFKYFDTTIDRKRYTSTKEVLDATLIHQSITGLYETRIDLSQLGGDGGGGGPAPGSSGGTLNIEDEYRLHETSKEPDVSLGSTWLSDFPQAWAETGGMGLAVRQAPLIIPLKATSTPVSIKQYPMSQEARLGIKPHIQRLLDQGILVPCQSPWNTPLLPVKKPGTNDYRPVQDLREVNKRVEDIHPTVPNPYNLLSGLPPSHQWYTVLDLKDAFFCLRLHPTSQPLFAFEWRDPEMGISGQLTWTRLPQGFKNSPTLFNEALHRDLAGFRIQHPDLILLQYVDDLLLAATSELDCQQGTRALLQTLGDLGYRASAKKAQICQKQVKYLGYLLKEGQRWLTEARKETVMGQPIPKTPRQLREFLGKAGFCRLFIPGFAEMAAPLYPLTKPGTLFNWGPDQQKAFQEIKQALLTAPALGLPDLTKPFELFVDEKQGYAKGVLTQKLGPWRRPVAYLSKKLDPVAAGWPPCLRMVAAIAVLTKDAGKLTMGQPLVILAPHAVEALVKQPPDRWLSNARMTHYQALLLDTDRVQFGPVVALNPATLLPLPEEGLQHDCLDILAEAHGTRSDLMDQPLPDADHTWYTDGSSFLQEGQRKAGAAVTTETEVIWARALPAGTSAQRAELIALTQALKMAEGKKLNVYTDSRYAFATAHIHGEIYRRRGWLTSEGKEIKNKDEILALLKALFLPKRLSIIHCPGHQKGNSAEARGNRMADQAAREVATRETPETSTLLAGKRTADGSEFEKRTADGSEFESPKKKAKVE

SEQ ID NO: 7373 - protein, 2094 aa, synthetic construct
MPAAKRVKLDGGDKKYSIGLDIGTNSVGWAVITDEYKVPSKKFKVLGNTDRHSIKKNLIGALLFDSGETAEATRLKRTARRRYTRRKNRICYLQEIFSNEMAKVDDSFFHRLEESFLVEEDKKHERHPIFGNIVDEVAYHEKYPTIYHLRKKLVDSTDKADLRLIYLALAHMIKFRGHFLIEGDLNPDNSDVDKLFIQLVQTYNQLFEENPINASGVDAKAILSARLSKSRRLENLIAQLPGEKKNGLFGNLIALSLGLTPNFKSNFDLAEDAKLQLSKDTYDDDLDNLLAQIGDQYADLFLAAKNLSDAILLSDILRVNTEITKAPLSASMIKRYDEHHQDLTLLKALVRQQLPEKYKEIFFDQSKNGYAGYIDGGASQEEFYKFIKPILEKMDGTEELLVKLNREDLLRKQRTFDNGSIPHQIHLGELHAILRRQEDFYPFLKDNREKIEKILTFRIPYYVGPLARGNSRFAWMTRKSEETITPWNFEEVVDKGASAQSFIERMTNFDKNLPNEKVLPKHSLLYEYFTVYNELTKVKYVTEGMRKPAFLSGEQKKAIVDLLFKTNRKVTVKQLKEDYFKKIECFDSVEISGVEDRFNASLGTYHDLLKIIKDKDFLDNEENEDILEDIVLTLTLFEDREMIEERLKTYAHLFDDKVMKQLKRRRYTGWGRLSRKLINGIRDKQSGKTILDFLKSDGFANRNFMQLIHDDSLTFKEDIQKAQVSGQGDSLHEHIANLAGSPAIKKGILQTVKVVDELVKVMGRHKPENIVIEMARENQTTQKGQKNSRERMKRIEEGIKELGSQILKEHPVENTQLQNEKLYLYYLQNGRDMYVDQELDINRLSDYDVDHIVPQSFLKDDSIDNKVLTRSDKARGKSDNVPSEEVVKKMKNYWRQLLNAKLITQRKFDNLTKAERGGLSELDKAGFIKRQLVETRQITKHVAQILDSRMNTKYDENDKLIREVKVITLKSKLVSDFRKDFQFYKVREINNYHHAHDAYLNAVVGTALIKKYPKLESEFVYGDYKVYDVRKMIAKSEQEIGKATAKYFFYSNIMNFFKTEITLANGEIRKRPLIETNGETGEIVWDKGRDFATVRKVLSMPQVNIVKKTEVQTGGFSKESILPKRNSDKLIARKKDWDPKKYGGFDSPTVAYSVLVVAKVEKGKSKKLKSVKELLGITIMERSSFEKNPIDFLEAKGYKEVKKDLIIKLPKYSLFELENGRKRMLASAGELQKGNELALPSKYVNFLYLASHYEKLKGSPEDNEQKQLFVEQHKHYLDEIIEQISEFSKRVILADANLDKVLSAYNKHRDKPIREQAENIIHLFTLTNLGAPAAFKYFDTTIDRKRYTSTKEVLDATLIHQSITGLYETRIDLSQLGGDGGGGGPAPGSSGGTLNIEDEYRLHETSKGPDVPLGSTWLSDFPQAWAETGGMGLAFRQAPLIISLKATSTPVSIKQYPMSQEARLGIKPHIQRLLDQGILVPCQSPWNTPLLPVKKPGTNDYRPVQDLREVNKRVEDIHPTVPNPYNLLSGLPPSHQWYTVLDLKDAFFCLRLHPTSQSLFAFEWKDPEMGISGQLTWTRLPQGFKNSPTLFNEALHRDLADFRIQHPDLILLQYVDDLLLAATSELDCQQGTRALLQTLGDLGYRASAKKAQICQKQVKYLGYLLKEGQRWLTEARKETVMGQPTPKTPRQLREFLGKAGLCRLFIPGFAEMAAPLYPLTKPGTLFKWGPDQQKAYQEIKQALLTAPALGLPDLTKPFELFVDEKQGYAKGVLTQKLGPWRRPVAYLSKKLDPVAAGWPPCLRMVAAIAVLTKDVGKLTMGQPLVILAPHAVEALVKQPPDRWLSNARMTHYQALLLDTDRVQFGPIVALNPATLLPLPEEGLQHDCLDILAEAHGTRPDLTDQPLPDADHTWYTDGSSFLQEGQRRAGAAVTTETEVIWAKALPAGTSAQRAELIALTQALKMAAGKKLNVYTDSRYAFATAHIHGEIYRRRGWLTSEGKEIKNKDEILALLKALFLPKRLSIIHCPGHQKGNHAEARGNRMADQAAREVATRETPETSTLLAGKRTADGSEFEKRTADGSEFESPKKKAKVE

SEQ ID NO: 7374 - protein, 2094 aa, synthetic construct
MPAAKRVKLDGGDKKYSIGLDIGTNSVGWAVITDEYKVPSKKFKVLGNTDRHSIKKNLIGALLFDSGETAEATRLKRTARRRYTRRKNRICYLQEIFSNEMAKVDDSFFHRLEESFLVEEDKKHERHPIFGNIVDEVAYHEKYPTIYHLRKKLVDSTDKADLRLIYLALAHMIKFRGHFLIEGDLNPDNSDVDKLFIQLVQTYNQLFEENPINASGVDAKAILSARLSKSRRLENLIAQLPGEKKNGLFGNLIALSLGLTPNFKSNFDLAEDAKLQLSKDTYDDDLDNLLAQIGDQYADLFLAAKNLSDAILLSDILRVNTEITKAPLSASMIKRYDEHHQDLTLLKALVRQQLPEKYKEIFFDQSKNGYAGYIDGGASQEEFYKFIKPILEKMDGTEELLVKLNREDLLRKQRTFDNGSIPHQIHLGELHAILRRQEDFYPFLKDNREKIEKILTFRIPYYVGPLARGNSRFAWMTRKSEETITPWNFEEVVDKGASAQSFIERMTNFDKNLPNEKVLPKHSLLYEYFTVYNELTKVKYVTEGMRKPAFLSGEQKKAIVDLLFKTNRKVTVKQLKEDYFKKIECFDSVEISGVEDRFNASLGTYHDLLKIIKDKDFLDNEENEDILEDIVLTLTLFEDREMIEERLKTYAHLFDDKVMKQLKRRRYTGWGRLSRKLINGIRDKQSGKTILDFLKSDGFANRNFMQLIHDDSLTFKEDIQKAQVSGQGDSLHEHIANLAGSPAIKKGILQTVKVVDELVKVMGRHKPENIVIEMARENQTTQKGQKNSRERMKRIEEGIKELGSQILKEHPVENTQLQNEKLYLYYLQNGRDMYVDQELDINRLSDYDVDHIVPQSFLKDDSIDNKVLTRSDKARGKSDNVPSEEVVKKMKNYWRQLLNAKLITQRKFDNLTKAERGGLSELDKAGFIKRQLVETRQITKHVAQILDSRMNTKYDENDKLIREVKVITLKSKLVSDFRKDFQFYKVREINNYHHAHDAYLNAVVGTALIKKYPKLESEFVYGDYKVYDVRKMIAKSEQEIGKATAKYFFYSNIMNFFKTEITLANGEIRKRPLIETNGETGEIVWDKGRDFATVRKVLSMPQVNIVKKTEVQTGGFSKESILPKRNSDKLIARKKDWDPKKYGGFDSPTVAYSVLVVAKVEKGKSKKLKSVKELLGITIMERSSFEKNPIDFLEAKGYKEVKKDLIIKLPKYSLFELENGRKRMLASAGELQKGNELALPSKYVNFLYLASHYEKLKGSPEDNEQKQLFVEQHKHYLDEIIEQISEFSKRVILADANLDKVLSAYNKHRDKPIREQAENIIHLFTLTNLGAPAAFKYFDTTIDRKRYTSTKEVLDATLIHQSITGLYETRIDLSQLGGDGGGGGPAPGSSGGTLNIEDEYRLHETSKGPDVPLGSTWLSDFPQAWAETGGMGLAVRQAPLIIPLKATSTPVSIKQYPMSQEARLGIKPHIQRLLDQGILVPCQSPWNTPLLPVKKPGTNDYRPVQDLREVNKRVEDIHPTVPNPYNLLSGLPPSHQWYTVLDLKDAFFCLRLHPTSQSLFAFEWRDPEMGISGQLTWTRLPQGFKNSPTLFNEALHRDLADFRIQHPDLILLQYVDDLLLAATSELDCQQGTRALLQTLGDLGYRASAKKAQICQKQVKYLGYLLKEGQRWLTEARKETVMGQPTPKTPRQLREFLGTAGFCRLWIPGFAEMAAPLYPLTKPGTLFEWGPDQQKAYQEIKQALLTAPALGLPDLTKPFELFVDEKQGYAKGVLTQKLGPWRRPVAYLSKKLDPVAAGWPPCLRMVAAIAVLTKDAGKLTMGQPLVILAPHAVEALVKQPPDRWLSNARMTHYQALLLDTDRVQFGPIVALNPATLLPLPEEGLQHDCLDILAEAHGTRPDLTDQPLPDADHTWYTDGSSFLQEGQRKAGAAVTTETEVVWAKALPAGTSAQRAELIALTQALKMAEGKKLNVYTDSRYAFATAHIHGEIYRRRGWLTSEGKEIKNKDEILALLKALFLPKRLSIIHCPGHQKGNRAEARGNRMADQAAREVATRETPETSTLLAGKRTADGSEFEKRTADGSEFESPKKKAKVE

SEQ ID NO: 7375 - protein, 2094 aa, synthetic construct
MPAAKRVKLDGGDKKYSIGLDIGTNSVGWAVITDEYKVPSKKFKVLGNTDRHSIKKNLIGALLFDSGETAEATRLKRTARRRYTRRKNRICYLQEIFSNEMAKVDDSFFHRLEESFLVEEDKKHERHPIFGNIVDEVAYHEKYPTIYHLRKKLVDSTDKADLRLIYLALAHMIKFRGHFLIEGDLNPDNSDVDKLFIQLVQTYNQLFEENPINASGVDAKAILSARLSKSRRLENLIAQLPGEKKNGLFGNLIALSLGLTPNFKSNFDLAEDAKLQLSKDTYDDDLDNLLAQIGDQYADLFLAAKNLSDAILLSDILRVNTEITKAPLSASMIKRYDEHHQDLTLLKALVRQQLPEKYKEIFFDQSKNGYAGYIDGGASQEEFYKFIKPILEKMDGTEELLVKLNREDLLRKQRTFDNGSIPHQIHLGELHAILRRQEDFYPFLKDNREKIEKILTFRIPYYVGPLARGNSRFAWMTRKSEETITPWNFEEVVDKGASAQSFIERMTNFDKNLPNEKVLPKHSLLYEYFTVYNELTKVKYVTEGMRKPAFLSGEQKKAIVDLLFKTNRKVTVKQLKEDYFKKIECFDSVEISGVEDRFNASLGTYHDLLKIIKDKDFLDNEENEDILEDIVLTLTLFEDREMIEERLKTYAHLFDDKVMKQLKRRRYTGWGRLSRKLINGIRDKQSGKTILDFLKSDGFANRNFMQLIHDDSLTFKEDIQKAQVSGQGDSLHEHIANLAGSPAIKKGILQTVKVVDELVKVMGRHKPENIVIEMARENQTTQKGQKNSRERMKRIEEGIKELGSQILKEHPVENTQLQNEKLYLYYLQNGRDMYVDQELDINRLSDYDVDHIVPQSFLKDDSIDNKVLTRSDKARGKSDNVPSEEVVKKMKNYWRQLLNAKLITQRKFDNLTKAERGGLSELDKAGFIKRQLVETRQITKHVAQILDSRMNTKYDENDKLIREVKVITLKSKLVSDFRKDFQFYKVREINNYHHAHDAYLNAVVGTALIKKYPKLESEFVYGDYKVYDVRKMIAKSEQEIGKATAKYFFYSNIMNFFKTEITLANGEIRKRPLIETNGETGEIVWDKGRDFATVRKVLSMPQVNIVKKTEVQTGGFSKESILPKRNSDKLIARKKDWDPKKYGGFDSPTVAYSVLVVAKVEKGKSKKLKSVKELLGITIMERSSFEKNPIDFLEAKGYKEVKKDLIIKLPKYSLFELENGRKRMLASAGELQKGNELALPSKYVNFLYLASHYEKLKGSPEDNEQKQLFVEQHKHYLDEIIEQISEFSKRVILADANLDKVLSAYNKHRDKPIREQAENIIHLFTLTNLGAPAAFKYFDTTIDRKRYTSTKEVLDATLIHQSITGLYETRIDLSQLGGDGGGGGPAPGSSGGTLNIEDEYRLHEISTEPDVSPGSTWLSDFPQAWAETGGMGLAVRQAPLIIPLKATSTPVSIKQYPMSQEAKLGIKPHIQRLLDQGILVPCQSPWNTPLLPVKKPGTNDYRPVQGLREVNKRVEDIHPTVPNPYNLLSGLPTSHRWYTVLDLKDAFFCLRLHPTSQPLFASEWRDPGMGISGQLTWTRLPQGFKNSPTLFDEALHRGLADFRIQHPDLILLQYVDDLLLAATSELDCQQGTRALLKTLGNLGYRASAKKAQICQKQVKYLGYLLREGQRWLTEARKETVMGQPTPKTPRQLREFLGTAGFCRLWIPRFAEMAAPLYPLTKTGTLFNWGPDQQKAYHEIKQALLTAPALGLPDLTKPFELFVDEKQGYAKGVLTQKLGPWRRPVAYLSKKLDPVAAGWPPCLRMVAAIAVLTKDAGKLTMGQPLVILAPHAVEALVKQPPDRWLSNARMTHYQAMLLDTDRVQFGPVVALNPATLLPLPEEGAPHDCLEILAETHGTEPDLTDQPIPDADHTWYTDGSSFLQEGQRKAGAAVTTETEVIWARALPAGTSAQRAELIALTQALKMAEGKRLNVYTDSRYAFATAHIHGEIYKRRGLLTSEGREIKNKSEILALLKALFLPKRLSIIHCLGHQKGDSAEARGNRLADQAAREAAIKTPPDTSTLLAGKRTADGSEFEKRTADGSEFESPKKKAKVE

SEQ ID NO: 7376 - protein, 2114 aa, synthetic construct
MPAAKRVKLDGGDKKYSIGLDIGTNSVGWAVITDEYKVPSKKFKVLGNTDRHSIKKNLIGALLFDSGETAEATRLKRTARRRYTRRKNRICYLQEIFSNEMAKVDDSFFHRLEESFLVEEDKKHERHPIFGNIVDEVAYHEKYPTIYHLRKKLVDSTDKADLRLIYLALAHMIKFRGHFLIEGDLNPDNSDVDKLFIQLVQTYNQLFEENPINASGVDAKAILSARLSKSRRLENLIAQLPGEKKNGLFGNLIALSLGLTPNFKSNFDLAEDAKLQLSKDTYDDDLDNLLAQIGDQYADLFLAAKNLSDAILLSDILRVNTEITKAPLSASMIKRYDEHHQDLTLLKALVRQQLPEKYKEIFFDQSKNGYAGYIDGGASQEEFYKFIKPILEKMDGTEELLVKLNREDLLRKQRTFDNGSIPHQIHLGELHAILRRQEDFYPFLKDNREKIEKILTFRIPYYVGPLARGNSRFAWMTRKSEETITPWNFEEVVDKGASAQSFIERMTNFDKNLPNEKVLPKHSLLYEYFTVYNELTKVKYVTEGMRKPAFLSGEQKKAIVDLLFKTNRKVTVKQLKEDYFKKIECFDSVEISGVEDRFNASLGTYHDLLKIIKDKDFLDNEENEDILEDIVLTLTLFEDREMIEERLKTYAHLFDDKVMKQLKRRRYTGWGRLSRKLINGIRDKQSGKTILDFLKSDGFANRNFMQLIHDDSLTFKEDIQKAQVSGQGDSLHEHIANLAGSPAIKKGILQTVKVVDELVKVMGRHKPENIVIEMARENQTTQKGQKNSRERMKRIEEGIKELGSQILKEHPVENTQLQNEKLYLYYLQNGRDMYVDQELDINRLSDYDVDHIVPQSFLKDDSIDNKVLTRSDKARGKSDNVPSEEVVKKMKNYWRQLLNAKLITQRKFDNLTKAERGGLSELDKAGFIKRQLVETRQITKHVAQILDSRMNTKYDENDKLIREVKVITLKSKLVSDFRKDFQFYKVREINNYHHAHDAYLNAVVGTALIKKYPKLESEFVYGDYKVYDVRKMIAKSEQEIGKATAKYFFYSNIMNFFKTEITLANGEIRKRPLIETNGETGEIVWDKGRDFATVRKVLSMPQVNIVKKTEVQTGGFSKESILPKRNSDKLIARKKDWDPKKYGGFDSPTVAYSVLVVAKVEKGKSKKLKSVKELLGITIMERSSFEKNPIDFLEAKGYKEVKKDLIIKLPKYSLFELENGRKRMLASAGELQKGNELALPSKYVNFLYLASHYEKLKGSPEDNEQKQLFVEQHKHYLDEIIEQISEFSKRVILADANLDKVLSAYNKHRDKPIREQAENIIHLFTLTNLGAPAAFKYFDTTIDRKRYTSTKEVLDATLIHQSITGLYETRIDLSQLGGDGGGGGPAPGSSGGWVQEISDSRPMLHIYLNGRRFLGLLNTGADKTCIAGRDWPANWPIHQTESSLQGLGMACGVARSSQPLRWQHEDKSGIIHPFVIPTLPFTLWGRDIMKDIKVRLMTDSPDDSQDLMIGAIESNLFADQISWKSDQPVWLNQWPLKQEKLQALQQLVTEQLQLGHLEESNSPWNTPVFVIKKKSGKWRLLQDLRAVNATMHDMGALQPGLPSPVAPPKGWEIIIIDLQDCFFNIKLHPEDCKRFAFSVPSPNFKRPYQRFQWKVLPQGMKNSPTLCQKFVDKAILTVRDKYQDSYIVHYMDDILLAHPSRSIVDEILTSMIQALNKHGLVVSTEKIQKYDNLKYLGTHIQGDSVSYQKLQIRTDKLRTLNDFQKLLGNINWIRPFLKLTTGELKPLFEILNPDSNPISTRKLTPEACKALQLMNERLSTARVKRLDLSQPWSLCILKTEYTPTACLWQDGVVEWIHLPHISPKVITPYDIFCTQLIIKGRHRSKELFSKDPDYIVVPYTKVQFDLLLQEKEDWPISLLGFLGEVHFHLPKDPLLTFTLQTAIIFPHMTSTTPLEKGIVIFTDGSANGRSVTYIQGREPIIKENTQNTAQQAEIVAVITAFEEVSQPFNLYTDSKYVTGLFPEIETATLSPRTKIYTELKHLQRLIHKRQEKFYIGHIRGHTGLPGPLAQGNAYADSLTRILTAGKRTADGSEFEKRTADGSEFESPKKKAKVE

SEQ ID NO: 7377 - protein, 2085 aa, synthetic construct
MPAAKRVKLDGGDKKYSIGLDIGTNSVGWAVITDEYKVPSKKFKVLGNTDRHSIKKNLIGALLFDSGETAEATRLKRTARRRYTRRKNRICYLQEIFSNEMAKVDDSFFHRLEESFLVEEDKKHERHPIFGNIVDEVAYHEKYPTIYHLRKKLVDSTDKADLRLIYLALAHMIKFRGHFLIEGDLNPDNSDVDKLFIQLVQTYNQLFEENPINASGVDAKAILSARLSKSRRLENLIAQLPGEKKNGLFGNLIALSLGLTPNFKSNFDLAEDAKLQLSKDTYDDDLDNLLAQIGDQYADLFLAAKNLSDAILLSDILRVNTEITKAPLSASMIKRYDEHHQDLTLLKALVRQQLPEKYKEIFFDQSKNGYAGYIDGGASQEEFYKFIKPILEKMDGTEELLVKLNREDLLRKQRTFDNGSIPHQIHLGELHAILRRQEDFYPFLKDNREKIEKILTFRIPYYVGPLARGNSRFAWMTRKSEETITPWNFEEVVDKGASAQSFIERMTNFDKNLPNEKVLPKHSLLYEYFTVYNELTKVKYVTEGMRKPAFLSGEQKKAIVDLLFKTNRKVTVKQLKEDYFKKIECFDSVEISGVEDRFNASLGTYHDLLKIIKDKDFLDNEENEDILEDIVLTLTLFEDREMIEERLKTYAHLFDDKVMKQLKRRRYTGWGRLSRKLINGIRDKQSGKTILDFLKSDGFANRNFMQLIHDDSLTFKEDIQKAQVSGQGDSLHEHIANLAGSPAIKKGILQTVKVVDELVKVMGRHKPENIVIEMARENQTTQKGQKNSRERMKRIEEGIKELGSQILKEHPVENTQLQNEKLYLYYLQNGRDMYVDQELDINRLSDYDVDHIVPQSFLKDDSIDNKVLTRSDKARGKSDNVPSEEVVKKMKNYWRQLLNAKLITQRKFDNLTKAERGGLSELDKAGFIKRQLVETRQITKHVAQILDSRMNTKYDENDKLIREVKVITLKSKLVSDFRKDFQFYKVREINNYHHAHDAYLNAVVGTALIKKYPKLESEFVYGDYKVYDVRKMIAKSEQEIGKATAKYFFYSNIMNFFKTEITLANGEIRKRPLIETNGETGEIVWDKGRDFATVRKVLSMPQVNIVKKTEVQTGGFSKESILPKRNSDKLIARKKDWDPKKYGGFDSPTVAYSVLVVAKVEKGKSKKLKSVKELLGITIMERSSFEKNPIDFLEAKGYKEVKKDLIIKLPKYSLFELENGRKRMLASAGELQKGNELALPSKYVNFLYLASHYEKLKGSPEDNEQKQLFVEQHKHYLDEIIEQISEFSKRVILADANLDKVLSAYNKHRDKPIREQAENIIHLFTLTNLGAPAAFKYFDTTIDRKRYTSTKEVLDATLIHQSITGLYETRIDLSQLGGDGGGGGPAPGSSGGIPWLMKKPLQLTTLVPLQEYEERLLKQTMLTGSYKEKLQSLFLKYDALWQHWENQVGHRRIKPHHIATGTVNPRPQKQYPINPKAKASIQTVINDLLKQGVLIQQNSIMNTPVYPVPKPDGKWRMVLDYREVNKTIPLIAAQNQHSAGILSSIFRGKYKTTLDLSNGFWAHSITPESYWLTAFTWLGQQYCWTRLPQGFLNSPALFNADVVDLLKEVPNVQVYVDDIYISHDDPREHLEQLEKVFSLLLNAGYVVSLKKSEIAQHEVEFLGFNITKEGRGLTETFKQKLLNITPPRDLKQLQSILGLLNFARNFIPNFSELVKPLYNIIATAPGKYITWTTDNSQQLQNIISMLNSAENLEERNPEVRLIMKVNTSPSAGYIRFYNEFAKRPIMYLNYVYTKAEVKFTNTEKLLTTIHKGLIKALDLGMGQEILVYSPIVSMTKIQKTPLPERKALPIRWITWMSYLEDPRIQFHYDKTLPELQQVPTVTDDIIAKIKHPSEFSMVFYTDGSAIKHPNVNKSHNAGMGIAQVQFKPEFTVINTWSIPLGDHTAQLAEVAAVEFACKKALKIDGPVLIVTDSFYVAESVNKELPYWQSNGFFNNKKKPLKHVSKWKSIADCIQLKPDIIIIHEKGHQPTASTFHTEGNNLADKLATQGSYVVNAGKRTADGSEFEKRTADGSEFESPKKKAKVE

SEQ ID NO: 7378 - protein, 2092 aa, synthetic construct
MPAAKRVKLDGGDKKYSIGLDIGTNSVGWAVITDEYKVPSKKFKVLGNTDRHSIKKNLIGALLFDSGETAEATRLKRTARRRYTRRKNRICYLQEIFSNEMAKVDDSFFHRLEESFLVEEDKKHERHPIFGNIVDEVAYHEKYPTIYHLRKKLVDSTDKADLRLIYLALAHMIKFRGHFLIEGDLNPDNSDVDKLFIQLVQTYNQLFEENPINASGVDAKAILSARLSKSRRLENLIAQLPGEKKNGLFGNLIALSLGLTPNFKSNFDLAEDAKLQLSKDTYDDDLDNLLAQIGDQYADLFLAAKNLSDAILLSDILRVNTEITKAPLSASMIKRYDEHHQDLTLLKALVRQQLPEKYKEIFFDQSKNGYAGYIDGGASQEEFYKFIKPILEKMDGTEELLVKLNREDLLRKQRTFDNGSIPHQIHLGELHAILRRQEDFYPFLKDNREKIEKILTFRIPYYVGPLARGNSRFAWMTRKSEETITPWNFEEVVDKGASAQSFIERMTNFDKNLPNEKVLPKHSLLYEYFTVYNELTKVKYVTEGMRKPAFLSGEQKKAIVDLLFKTNRKVTVKQLKEDYFKKIECFDSVEISGVEDRFNASLGTYHDLLKIIKDKDFLDNEENEDILEDIVLTLTLFEDREMIEERLKTYAHLFDDKVMKQLKRRRYTGWGRLSRKLINGIRDKQSGKTILDFLKSDGFANRNFMQLIHDDSLTFKEDIQKAQVSGQGDSLHEHIANLAGSPAIKKGILQTVKVVDELVKVMGRHKPENIVIEMARENQTTQKGQKNSRERMKRIEEGIKELGSQILKEHPVENTQLQNEKLYLYYLQNGRDMYVDQELDINRLSDYDVDHIVPQSFLKDDSIDNKVLTRSDKARGKSDNVPSEEVVKKMKNYWRQLLNAKLITQRKFDNLTKAERGGLSELDKAGFIKRQLVETRQITKHVAQILDSRMNTKYDENDKLIREVKVITLKSKLVSDFRKDFQFYKVREINNYHHAHDAYLNAVVGTALIKKYPKLESEFVYGDYKVYDVRKMIAKSEQEIGKATAKYFFYSNIMNFFKTEITLANGEIRKRPLIETNGETGEIVWDKGRDFATVRKVLSMPQVNIVKKTEVQTGGFSKESILPKRNSDKLIARKKDWDPKKYGGFDSPTVAYSVLVVAKVEKGKSKKLKSVKELLGITIMERSSFEKNPIDFLEAKGYKEVKKDLIIKLPKYSLFELENGRKRMLASAGELQKGNELALPSKYVNFLYLASHYEKLKGSPEDNEQKQLFVEQHKHYLDEIIEQISEFSKRVILADANLDKVLSAYNKHRDKPIREQAENIIHLFTLTNLGAPAAFKYFDTTIDRKRYTSTKEVLDATLIHQSITGLYETRIDLSQLGGDGGGGGPAPGSSGGVLNLEEEYRLHEKPVPSSIDPSWLQLFPTVWAERAGMGLANQVPPVVVELRSGASPVAVRQYPMSKEAREGIRPHIQRFLDLGVLVPCQSPWNTPLLPVKKPGTNDYRPVQDLREINKRVQDIHPTVPNPYNLLSSLPPSHTWYSVLDLKDAFFCLKLHPNSQPLFAFEWRDPEKGNTGQLTWTRLPQGFKNSPTLFNEALHRDLAPFRALNPQVVLLQYVDDLLVAAPTYRDCKEGTQKLLQELSKLGYRVSAKKAQLCQKEVTYLGYLLKEGKRWLTPARKATVMKIPPPTTPRQVREFLGTAGFCRLWIPGFASLAAPLYPLTKPSIPFIWTEEHQKAFDRIKEALLSAPALALPDLTKPFTLYVDERAGVARGVLTQTLGPWRRPVAYLSKKLDPVASGWPTCLKAVAAVALLLKDADKLTLGQNVTVIASHSLESIVRQPPDRWMTNARMTHYQSLLLNERVSFAPPAVLNPATLLPVESEATPVHRCSEILAEETGTRRDLKDQPLPGVPAWYTDGSSFIAEGKRRAGAAIVDGKRTVWASSLPEGTSAQKAELVALTQALRLAEGKDINIYTDSRYAFATAHIHGAIYKQRGWLTSAGKDIKNKEEILALLEAIHLPKRVAIIHCPGHQKGNDPVATGNRRADEAAKQAALSTRVLAETTKPAGKRTADGSEFEKRTADGSEFESPKKKAKVE

SEQ ID NO: 7379 - protein, 2096 aa, synthetic construct
MPAAKRVKLDGGDKKYSIGLDIGTNSVGWAVITDEYKVPSKKFKVLGNTDRHSIKKNLIGALLFDSGETAEATRLKRTARRRYTRRKNRICYLQEIFSNEMAKVDDSFFHRLEESFLVEEDKKHERHPIFGNIVDEVAYHEKYPTIYHLRKKLVDSTDKADLRLIYLALAHMIKFRGHFLIEGDLNPDNSDVDKLFIQLVQTYNQLFEENPINASGVDAKAILSARLSKSRRLENLIAQLPGEKKNGLFGNLIALSLGLTPNFKSNFDLAEDAKLQLSKDTYDDDLDNLLAQIGDQYADLFLAAKNLSDAILLSDILRVNTEITKAPLSASMIKRYDEHHQDLTLLKALVRQQLPEKYKEIFFDQSKNGYAGYIDGGASQEEFYKFIKPILEKMDGTEELLVKLNREDLLRKQRTFDNGSIPHQIHLGELHAILRRQEDFYPFLKDNREKIEKILTFRIPYYVGPLARGNSRFAWMTRKSEETITPWNFEEVVDKGASAQSFIERMTNFDKNLPNEKVLPKHSLLYEYFTVYNELTKVKYVTEGMRKPAFLSGEQKKAIVDLLFKTNRKVTVKQLKEDYFKKIECFDSVEISGVEDRFNASLGTYHDLLKIIKDKDFLDNEENEDILEDIVLTLTLFEDREMIEERLKTYAHLFDDKVMKQLKRRRYTGWGRLSRKLINGIRDKQSGKTILDFLKSDGFANRNFMQLIHDDSLTFKEDIQKAQVSGQGDSLHEHIANLAGSPAIKKGILQTVKVVDELVKVMGRHKPENIVIEMARENQTTQKGQKNSRERMKRIEEGIKELGSQILKEHPVENTQLQNEKLYLYYLQNGRDMYVDQELDINRLSDYDVDHIVPQSFLKDDSIDNKVLTRSDKARGKSDNVPSEEVVKKMKNYWRQLLNAKLITQRKFDNLTKAERGGLSELDKAGFIKRQLVETRQITKHVAQILDSRMNTKYDENDKLIREVKVITLKSKLVSDFRKDFQFYKVREINNYHHAHDAYLNAVVGTALIKKYPKLESEFVYGDYKVYDVRKMIAKSEQEIGKATAKYFFYSNIMNFFKTEITLANGEIRKRPLIETNGETGEIVWDKGRDFATVRKVLSMPQVNIVKKTEVQTGGFSKESILPKRNSDKLIARKKDWDPKKYGGFDSPTVAYSVLVVAKVEKGKSKKLKSVKELLGITIMERSSFEKNPIDFLEAKGYKEVKKDLIIKLPKYSLFELENGRKRMLASAGELQKGNELALPSKYVNFLYLASHYEKLKGSPEDNEQKQLFVEQHKHYLDEIIEQISEFSKRVILADANLDKVLSAYNKHRDKPIREQAENIIHLFTLTNLGAPAAFKYFDTTIDRKRYTSTKEVLDATLIHQSITGLYETRIDLSQLGGDGGGSSGGGPAPGGTAPLEEEYRLFLEAPIQNVTLLEQWKREIPKVWAEINPPGLASTQAPIHVQLLSTALPVRVRQYPITLEAKRSLRETIRKFRAAGILRPVHSPWNTPLLPVRKSGTSEYRMVQDLREVNKRVETIHPTVPNPYTLLSLLPPDRIWYSVLDLKDAFFCIPLAPESQLIFAFEWADAEEGESGQLTWTRLPQGFKNSPTLFDEALNRDLQGFRLDHPSVSLLQYVDDLLIAADTQAACLSATRDLLMTLAELGYRVSGKKAQLCQEEVTYLGFKIHKGSRSLSNSRTQAILQIPVPKTKRQVREFLGTIGYCRLWIPGFAELAQPLYAATRGGNDPLVWGEKEEEAFQSLKLALTQPPALALPSLDKPFQLFVEETSGAAKGVLTQALGPWKRPVAYLSKRLDPVAAGWPRCLRAIAAAALLTREASKLTFGQDIEITSSHNLESLLRSPPDKWLTNARITQYQVLLLDPPRVRFKQTAALNPATLLPETDDTLPIHHCLDTLDSLTSTRPDLTDQPLAQAEATLFTDGSSYIRDGKRYAGAAVVTLDSVIWAEPLPIGTSAQKAELIALTKALEWSKDKSVNIYTDSRYAFATLHVHGMIYRERGLLTAGGKAIKNAPEILALLTAVWLPKRVAVMHCKGHQKDDAPTSTGNRRADEVAREVAIRPLSTQATISAGKRTADGSEFEKRTADGSEFESPKKKAKVE

SEQ ID NO: 7380 - protein, 2096 aa, synthetic construct
MPAAKRVKLDGGDKKYSIGLDIGTNSVGWAVITDEYKVPSKKFKVLGNTDRHSIKKNLIGALLFDSGETAEATRLKRTARRRYTRRKNRICYLQEIFSNEMAKVDDSFFHRLEESFLVEEDKKHERHPIFGNIVDEVAYHEKYPTIYHLRKKLVDSTDKADLRLIYLALAHMIKFRGHFLIEGDLNPDNSDVDKLFIQLVQTYNQLFEENPINASGVDAKAILSARLSKSRRLENLIAQLPGEKKNGLFGNLIALSLGLTPNFKSNFDLAEDAKLQLSKDTYDDDLDNLLAQIGDQYADLFLAAKNLSDAILLSDILRVNTEITKAPLSASMIKRYDEHHQDLTLLKALVRQQLPEKYKEIFFDQSKNGYAGYIDGGASQEEFYKFIKPILEKMDGTEELLVKLNREDLLRKQRTFDNGSIPHQIHLGELHAILRRQEDFYPFLKDNREKIEKILTFRIPYYVGPLARGNSRFAWMTRKSEETITPWNFEEVVDKGASAQSFIERMTNFDKNLPNEKVLPKHSLLYEYFTVYNELTKVKYVTEGMRKPAFLSGEQKKAIVDLLFKTNRKVTVKQLKEDYFKKIECFDSVEISGVEDRFNASLGTYHDLLKIIKDKDFLDNEENEDILEDIVLTLTLFEDREMIEERLKTYAHLFDDKVMKQLKRRRYTGWGRLSRKLINGIRDKQSGKTILDFLKSDGFANRNFMQLIHDDSLTFKEDIQKAQVSGQGDSLHEHIANLAGSPAIKKGILQTVKVVDELVKVMGRHKPENIVIEMARENQTTQKGQKNSRERMKRIEEGIKELGSQILKEHPVENTQLQNEKLYLYYLQNGRDMYVDQELDINRLSDYDVDHIVPQSFLKDDSIDNKVLTRSDKARGKSDNVPSEEVVKKMKNYWRQLLNAKLITQRKFDNLTKAERGGLSELDKAGFIKRQLVETRQITKHVAQILDSRMNTKYDENDKLIREVKVITLKSKLVSDFRKDFQFYKVREINNYHHAHDAYLNAVVGTALIKKYPKLESEFVYGDYKVYDVRKMIAKSEQEIGKATAKYFFYSNIMNFFKTEITLANGEIRKRPLIETNGETGEIVWDKGRDFATVRKVLSMPQVNIVKKTEVQTGGFSKESILPKRNSDKLIARKKDWDPKKYGGFDSPTVAYSVLVVAKVEKGKSKKLKSVKELLGITIMERSSFEKNPIDFLEAKGYKEVKKDLIIKLPKYSLFELENGRKRMLASAGELQKGNELALPSKYVNFLYLASHYEKLKGSPEDNEQKQLFVEQHKHYLDEIIEQISEFSKRVILADANLDKVLSAYNKHRDKPIREQAENIIHLFTLTNLGAPAAFKYFDTTIDRKRYTSTKEVLDATLIHQSITGLYETRIDLSQLGGDGGGSSGGGPAPGGTAPLEEEYRLFLEAPIQNVTLLEQWKREIPKVWAEINPPGLASTQAPIHVQLLSTALPVRVRQYPITLEAKRSLRETIRKFRAAGILRPVHSPWNTPLLPVRKSGTSEYRMVQDLREVNKRVETIHPTVPNPYTLLSLLPPDRIWYSVLDLKDAFFCIPLAPESQLIFAFEWADAEEGESGQLTWTRLPQGFKNSPTLFNEALNRDLQGFRLDHPSVSLLQYVDDLLIAADTQAACLSATRDLLMTLAELGYRVSGKKAQLCQEEVTYLGFKIHKGSRSLSNSRTQAILQIPVPKTKRQVREFLGTIGYCRLWIPGFAELAQPLYAATRPGNDPLVWGEKEEEAFQSLKLALTQPPALALPSLDKPFQLFVEETSGAAKGVLTQALGPWKRPVAYLSKRLDPVAAGWPRCLRAIAAAALLTREASKLTFGQDIEITSSHNLESLLRSPPDKWLTNARITQYQVLLLDPPRVRFKQTAALNPATLLPETDDTLPIHHCLDTLDSLTSTRPDLTDQPLAQAEATLFTDGSSYIRDGKRYAGAAVVTLDSVIWAEPLPIGTSAQKAELIALTKALEWSKDKSVNIYTDSRYAFATLHVHGMIYRERGWLTAGGKAIKNAPEILALLTAVWLPKRVAVMHCKGHQKDDAPTSTGNRRADEVAREVAIRPLSTQATISAGKRTADGSEFEKRTADGSEFESPKKKAKVE

SEQ ID NO: 7381 - protein, 2096 aa, synthetic construct
MPAAKRVKLDGGDKKYSIGLDIGTNSVGWAVITDEYKVPSKKFKVLGNTDRHSIKKNLIGALLFDSGETAEATRLKRTARRRYTRRKNRICYLQEIFSNEMAKVDDSFFHRLEESFLVEEDKKHERHPIFGNIVDEVAYHEKYPTIYHLRKKLVDSTDKADLRLIYLALAHMIKFRGHFLIEGDLNPDNSDVDKLFIQLVQTYNQLFEENPINASGVDAKAILSARLSKSRRLENLIAQLPGEKKNGLFGNLIALSLGLTPNFKSNFDLAEDAKLQLSKDTYDDDLDNLLAQIGDQYADLFLAAKNLSDAILLSDILRVNTEITKAPLSASMIKRYDEHHQDLTLLKALVRQQLPEKYKEIFFDQSKNGYAGYIDGGASQEEFYKFIKPILEKMDGTEELLVKLNREDLLRKQRTFDNGSIPHQIHLGELHAILRRQEDFYPFLKDNREKIEKILTFRIPYYVGPLARGNSRFAWMTRKSEETITPWNFEEVVDKGASAQSFIERMTNFDKNLPNEKVLPKHSLLYEYFTVYNELTKVKYVTEGMRKPAFLSGEQKKAIVDLLFKTNRKVTVKQLKEDYFKKIECFDSVEISGVEDRFNASLGTYHDLLKIIKDKDFLDNEENEDILEDIVLTLTLFEDREMIEERLKTYAHLFDDKVMKQLKRRRYTGWGRLSRKLINGIRDKQSGKTILDFLKSDGFANRNFMQLIHDDSLTFKEDIQKAQVSGQGDSLHEHIANLAGSPAIKKGILQTVKVVDELVKVMGRHKPENIVIEMARENQTTQKGQKNSRERMKRIEEGIKELGSQILKEHPVENTQLQNEKLYLYYLQNGRDMYVDQELDINRLSDYDVDHIVPQSFLKDDSIDNKVLTRSDKARGKSDNVPSEEVVKKMKNYWRQLLNAKLITQRKFDNLTKAERGGLSELDKAGFIKRQLVETRQITKHVAQILDSRMNTKYDENDKLIREVKVITLKSKLVSDFRKDFQFYKVREINNYHHAHDAYLNAVVGTALIKKYPKLESEFVYGDYKVYDVRKMIAKSEQEIGKATAKYFFYSNIMNFFKTEITLANGEIRKRPLIETNGETGEIVWDKGRDFATVRKVLSMPQVNIVKKTEVQTGGFSKESILPKRNSDKLIARKKDWDPKKYGGFDSPTVAYSVLVVAKVEKGKSKKLKSVKELLGITIMERSSFEKNPIDFLEAKGYKEVKKDLIIKLPKYSLFELENGRKRMLASAGELQKGNELALPSKYVNFLYLASHYEKLKGSPEDNEQKQLFVEQHKHYLDEIIEQISEFSKRVILADANLDKVLSAYNKHRDKPIREQAENIIHLFTLTNLGAPAAFKYFDTTIDRKRYTSTKEVLDATLIHQSITGLYETRIDLSQLGGDGGGSSGGGPAPGGTAPLEEEYRLFLEAPIQNVTLLEQWKREIPKVWAEINPPGLASTQAPIHVQLLSTALPVRVRQYPITLEAKRSLRETIRKFRAAGILRPVHSPWNTPLLPVRKSGTSEYRMVQDLREVNKRVETIHPTVPNPYTLLSLLPPDRIWYSVLDLKDAFFCIPLAPESQLIFAFEWADAEEGESGQLTWTRLPQGFKNSPTLFNEALNRDLQGFRLDHPSVSLLQYVDDLLIAADTQAACLSATRDLLMTLAELGYRVSGKKAQLCQEEVTYLGFKIHKGSRSLSNSRTQAILQIPVPKTKRQVREFLGKIGYCRLFIPGFAELAQPLYAATRPGNDPLVWGEKEEEAFQSLKLALTQPPALALPSLDKPFQLFVEETSGAAKGVLTQALGPWKRPVAYLSKRLDPVAAGWPRCLRAIAAAALLTREASKLTFGQDIEITSSHNLESLLRSPPDKWLTNARITQYQVLLLDPPRVRFKQTAALNPATLLPETDDTLPIHHCLDTLDSLTSTRPDLTDQPLAQAEATLFTDGSSYIRDGKRYAGAAVVTLDSVIWAEPLPIGTSAQKAELIALTKALEWSKDKSVNIYTDSRYAFATLHVHGMIYRERGWLTAGGKAIKNAPEILALLTAVWLPKRVAVMHCKGHQKDDAPTSTGNRRADEVAREVAIRPLSTQATISAGKRTADGSEFEKRTADGSEFESPKKKAKVE

SEQ ID NO: 7382 - protein, 2100 aa, synthetic construct
MPAAKRVKLDGGDKKYSIGLDIGTNSVGWAVITDEYKVPSKKFKVLGNTDRHSIKKNLIGALLFDSGETAEATRLKRTARRRYTRRKNRICYLQEIFSNEMAKVDDSFFHRLEESFLVEEDKKHERHPIFGNIVDEVAYHEKYPTIYHLRKKLVDSTDKADLRLIYLALAHMIKFRGHFLIEGDLNPDNSDVDKLFIQLVQTYNQLFEENPINASGVDAKAILSARLSKSRRLENLIAQLPGEKKNGLFGNLIALSLGLTPNFKSNFDLAEDAKLQLSKDTYDDDLDNLLAQIGDQYADLFLAAKNLSDAILLSDILRVNTEITKAPLSASMIKRYDEHHQDLTLLKALVRQQLPEKYKEIFFDQSKNGYAGYIDGGASQEEFYKFIKPILEKMDGTEELLVKLNREDLLRKQRTFDNGSIPHQIHLGELHAILRRQEDFYPFLKDNREKIEKILTFRIPYYVGPLARGNSRFAWMTRKSEETITPWNFEEVVDKGASAQSFIERMTNFDKNLPNEKVLPKHSLLYEYFTVYNELTKVKYVTEGMRKPAFLSGEQKKAIVDLLFKTNRKVTVKQLKEDYFKKIECFDSVEISGVEDRFNASLGTYHDLLKIIKDKDFLDNEENEDILEDIVLTLTLFEDREMIEERLKTYAHLFDDKVMKQLKRRRYTGWGRLSRKLINGIRDKQSGKTILDFLKSDGFANRNFMQLIHDDSLTFKEDIQKAQVSGQGDSLHEHIANLAGSPAIKKGILQTVKVVDELVKVMGRHKPENIVIEMARENQTTQKGQKNSRERMKRIEEGIKELGSQILKEHPVENTQLQNEKLYLYYLQNGRDMYVDQELDINRLSDYDVDHIVPQSFLKDDSIDNKVLTRSDKARGKSDNVPSEEVVKKMKNYWRQLLNAKLITQRKFDNLTKAERGGLSELDKAGFIKRQLVETRQITKHVAQILDSRMNTKYDENDKLIREVKVITLKSKLVSDFRKDFQFYKVREINNYHHAHDAYLNAVVGTALIKKYPKLESEFVYGDYKVYDVRKMIAKSEQEIGKATAKYFFYSNIMNFFKTEITLANGEIRKRPLIETNGETGEIVWDKGRDFATVRKVLSMPQVNIVKKTEVQTGGFSKESILPKRNSDKLIARKKDWDPKKYGGFDSPTVAYSVLVVAKVEKGKSKKLKSVKELLGITIMERSSFEKNPIDFLEAKGYKEVKKDLIIKLPKYSLFELENGRKRMLASAGELQKGNELALPSKYVNFLYLASHYEKLKGSPEDNEQKQLFVEQHKHYLDEIIEQISEFSKRVILADANLDKVLSAYNKHRDKPIREQAENIIHLFTLTNLGAPAAFKYFDTTIDRKRYTSTKEVLDATLIHQSITGLYETRIDLSQLGGDGGGSSGGGPAPGGTVSLQDEHRLFDIPVTTSLPDVWLQDFPQAWAETGGLGRAKCQAPIIIDLKPTAVPVSIKQYPMSLEAHMGIRQHIIKFLELGVLRPCRSPWNTPLLPVKKPGTQDYRPVQDLREINKRTVDIHPTVPNPYNLLSTLKPDYSWYTVLDLKDAFFCLPLAPQSQELFAFEWKDPERGISGQLTWTRLPQGFKNSPTLFNEALHRDLTDFRTQHPEVTLLQYVDDLLLAAPTKKACTQGTRHLLQELGEKGYRASAKKAQICQTKVTYLGYILSEGKRWLTPGRIETVARIPPPRNPREVREFLGTAGFCRLWIPGFAELAAPLYALTKPSTPFTWQTEHQLAFEALKKALLSAPALGLPDTSKPFTLFLDERQGIAKGVLTQKLGPWKRPVAYLSKKLDPVAAGWPPCLRIMAATAMLVKDSAKLTLGQPLTVITPHTLEAIVRQPPDRWITNARLTHYQALLLDTDRVQFGPPVTLNPATLLPVPENQPSPHDCRQVLAETHGTREDLKDQELPDADHTWYTDGSSYLDSGTRRAGAAVVDGHNTIWAQSLPPGTSAQKAELIALTKALELSKGKKANIYTDSRYAFATAHTHGSIYERRGWLTSEGKEIKNKAEIIALLKALFLPQEVAIIHCPGHQKGQDPVAVGNRQADRVARQAAMAEVLTLATEPDNTSHITAGKRTADGSEFEKRTADGSEFESPKKKAKVE

SEQ ID NO: 7383 - protein, 2085 aa, synthetic construct
MPAAKRVKLDGGDKKYSIGLDIGTNSVGWAVITDEYKVPSKKFKVLGNTDRHSIKKNLIGALLFDSGETAEATRLKRTARRRYTRRKNRICYLQEIFSNEMAKVDDSFFHRLEESFLVEEDKKHERHPIFGNIVDEVAYHEKYPTIYHLRKKLVDSTDKADLRLIYLALAHMIKFRGHFLIEGDLNPDNSDVDKLFIQLVQTYNQLFEENPINASGVDAKAILSARLSKSRRLENLIAQLPGEKKNGLFGNLIALSLGLTPNFKSNFDLAEDAKLQLSKDTYDDDLDNLLAQIGDQYADLFLAAKNLSDAILLSDILRVNTEITKAPLSASMIKRYDEHHQDLTLLKALVRQQLPEKYKEIFFDQSKNGYAGYIDGGASQEEFYKFIKPILEKMDGTEELLVKLNREDLLRKQRTFDNGSIPHQIHLGELHAILRRQEDFYPFLKDNREKIEKILTFRIPYYVGPLARGNSRFAWMTRKSEETITPWNFEEVVDKGASAQSFIERMTNFDKNLPNEKVLPKHSLLYEYFTVYNELTKVKYVTEGMRKPAFLSGEQKKAIVDLLFKTNRKVTVKQLKEDYFKKIECFDSVEISGVEDRFNASLGTYHDLLKIIKDKDFLDNEENEDILEDIVLTLTLFEDREMIEERLKTYAHLFDDKVMKQLKRRRYTGWGRLSRKLINGIRDKQSGKTILDFLKSDGFANRNFMQLIHDDSLTFKEDIQKAQVSGQGDSLHEHIANLAGSPAIKKGILQTVKVVDELVKVMGRHKPENIVIEMARENQTTQKGQKNSRERMKRIEEGIKELGSQILKEHPVENTQLQNEKLYLYYLQNGRDMYVDQELDINRLSDYDVDHIVPQSFLKDDSIDNKVLTRSDKARGKSDNVPSEEVVKKMKNYWRQLLNAKLITQRKFDNLTKAERGGLSELDKAGFIKRQLVETRQITKHVAQILDSRMNTKYDENDKLIREVKVITLKSKLVSDFRKDFQFYKVREINNYHHAHDAYLNAVVGTALIKKYPKLESEFVYGDYKVYDVRKMIAKSEQEIGKATAKYFFYSNIMNFFKTEITLANGEIRKRPLIETNGETGEIVWDKGRDFATVRKVLSMPQVNIVKKTEVQTGGFSKESILPKRNSDKLIARKKDWDPKKYGGFDSPTVAYSVLVVAKVEKGKSKKLKSVKELLGITIMERSSFEKNPIDFLEAKGYKEVKKDLIIKLPKYSLFELENGRKRMLASAGELQKGNELALPSKYVNFLYLASHYEKLKGSPEDNEQKQLFVEQHKHYLDEIIEQISEFSKRVILADANLDKVLSAYNKHRDKPIREQAENIIHLFTLTNLGAPAAFKYFDTTIDRKRYTSTKEVLDATLIHQSITGLYETRIDLSQLGGDGGGSSGGGPAPGGVPWILKKPLELTIKLDLEEQQGTLLNNSILSKKGKEELKQLFEKYSALWQSWENQVGHRRIRPHKIATGTVKPTPQKQYHINPKAKPDIQIVINDLLKQGVLIQKESTMNTPVYPVPKPNGRWRMVLDYRAVNKVTPLIAVQNQHSYGILGSLFKGRYKTTIDLSNGFWAHPIVPEDYWITAFTWQGKQYCWTVLPQGFLNSPGLFTGDVVDLLQGIPNVEVYVDDVYISHDSEKEHLEYLDILFNRLKEAGYIISLKKSNIANSIVDFLGFQITNEGRGLTDTFKEKLENITAPTTLKQLQSILGLLNFARNFIPDFTELIAPLYALIPKSTKNYVPWQIEHSTTLETLITKLNGAEYLQGRKGDKTLIMKVNASYTTGYIRYYNEGEKKPISYVSIVFSKTELKFTELEKLLTTVHKGLLKALDLSMGQNIHVYSPIVSMQNIQKTPQTAKKALASRWLSWLSYLEDPRIRFFYDPQMPALKDLPAVDTGKDNKKHPSNFQHIFYTDGSAITSPTKEGHLNAGMGIVYFINKDGNLQKQQEWSISLGNHTAQFAEIAAFEFALKKCLPLGGNILVVTDSNYVAKAYNEELDVWASNGFVNNRKKPLKHISKWKSVADLKRLRPDVVVTHEPGHQKLDSSPHAYGNNLADQLATQASFKVHAGKRTADGSEFEKRTADGSEFESPKKKAKVE

SEQ ID NO: 7384 - protein, 2093 aa, synthetic construct
MPAAKRVKLDGGDKKYSIGLDIGTNSVGWAVITDEYKVPSKKFKVLGNTDRHSIKKNLIGALLFDSGETAEATRLKRTARRRYTRRKNRICYLQEIFSNEMAKVDDSFFHRLEESFLVEEDKKHERHPIFGNIVDEVAYHEKYPTIYHLRKKLVDSTDKADLRLIYLALAHMIKFRGHFLIEGDLNPDNSDVDKLFIQLVQTYNQLFEENPINASGVDAKAILSARLSKSRRLENLIAQLPGEKKNGLFGNLIALSLGLTPNFKSNFDLAEDAKLQLSKDTYDDDLDNLLAQIGDQYADLFLAAKNLSDAILLSDILRVNTEITKAPLSASMIKRYDEHHQDLTLLKALVRQQLPEKYKEIFFDQSKNGYAGYIDGGASQEEFYKFIKPILEKMDGTEELLVKLNREDLLRKQRTFDNGSIPHQIHLGELHAILRRQEDFYPFLKDNREKIEKILTFRIPYYVGPLARGNSRFAWMTRKSEETITPWNFEEVVDKGASAQSFIERMTNFDKNLPNEKVLPKHSLLYEYFTVYNELTKVKYVTEGMRKPAFLSGEQKKAIVDLLFKTNRKVTVKQLKEDYFKKIECFDSVEISGVEDRFNASLGTYHDLLKIIKDKDFLDNEENEDILEDIVLTLTLFEDREMIEERLKTYAHLFDDKVMKQLKRRRYTGWGRLSRKLINGIRDKQSGKTILDFLKSDGFANRNFMQLIHDDSLTFKEDIQKAQVSGQGDSLHEHIANLAGSPAIKKGILQTVKVVDELVKVMGRHKPENIVIEMARENQTTQKGQKNSRERMKRIEEGIKELGSQILKEHPVENTQLQNEKLYLYYLQNGRDMYVDQELDINRLSDYDVDHIVPQSFLKDDSIDNKVLTRSDKARGKSDNVPSEEVVKKMKNYWRQLLNAKLITQRKFDNLTKAERGGLSELDKAGFIKRQLVETRQITKHVAQILDSRMNTKYDENDKLIREVKVITLKSKLVSDFRKDFQFYKVREINNYHHAHDAYLNAVVGTALIKKYPKLESEFVYGDYKVYDVRKMIAKSEQEIGKATAKYFFYSNIMNFFKTEITLANGEIRKRPLIETNGETGEIVWDKGRDFATVRKVLSMPQVNIVKKTEVQTGGFSKESILPKRNSDKLIARKKDWDPKKYGGFDSPTVAYSVLVVAKVEKGKSKKLKSVKELLGITIMERSSFEKNPIDFLEAKGYKEVKKDLIIKLPKYSLFELENGRKRMLASAGELQKGNELALPSKYVNFLYLASHYEKLKGSPEDNEQKQLFVEQHKHYLDEIIEQISEFSKRVILADANLDKVLSAYNKHRDKPIREQAENIIHLFTLTNLGAPAAFKYFDTTIDRKRYTSTKEVLDATLIHQSITGLYETRIDLSQLGGDGGGSSGGGPAPGGTLQLEEEYRLFEPESTQKQEMDIWLKNFPQAWAETGGMGTAHCQAPVLIQLKATATPISIRQYPMPHEAYQGIKPHIRRMLDQGILKPCQSPWNTPLLPVKKPGTEDYRPVQDLREVNKRVEDIHPTVPNPYNLLSTLPPSHPWYTVLDLKDAFFCLRLHSESQLLFAFEWRDPEIGLSGQLTWTRLPQGFKNSPTLFNEALHSDLADFRVRYPALVLLQYVDDLLLAAATRTECLEGTKALLETLGNKGYRASAKKAQICLQEVTYLGYSLKDGQRWLTKARKEAILSIPVPKNSRQVREFLGTAGYCRLWIPGFAELAAPLYPLTRPGTLFQWGTEQQLAFEDIKKALLSSPALGLPDITKPFELFIDENSGFAKGVLVQKLGPWKRPVAYLSKKLDTVASGWPPCLRMVAAIAILVKDAGKLTLGQPLTILTSHPVEALVRQPPNKWLSNARMTHYQAMLLDAERVHFGPTVSLNPATLLPLPSGGNHHDCLQILAETHGTRPDLTDQPLPDADLTWYTDGSSFIRNGEREAGAAVTTESEVIWAAPLPPGTSAQRAELIALTQALKMAEGKKLTVYTDSRYAFATTHVHGEIYRRRGWLTSEGKEIKNKNEILALLEALFLPKRLSIIHCPGHQKGDSPQAKGNRLADDTAKKAATETHSSLTVLPAGKRTADGSEFEKRTADGSEFESPKKKAKVE

SEQ ID NO: 7385 - protein, 2174 aa, synthetic construct
MPAAKRVKLDGGDKKYSIGLDIGTNSVGWAVITDEYKVPSKKFKVLGNTDRHSIKKNLIGALLFDSGETAEATRLKRTARRRYTRRKNRICYLQEIFSNEMAKVDDSFFHRLEESFLVEEDKKHERHPIFGNIVDEVAYHEKYPTIYHLRKKLVDSTDKADLRLIYLALAHMIKFRGHFLIEGDLNPDNSDVDKLFIQLVQTYNQLFEENPINASGVDAKAILSARLSKSRRLENLIAQLPGEKKNGLFGNLIALSLGLTPNFKSNFDLAEDAKLQLSKDTYDDDLDNLLAQIGDQYADLFLAAKNLSDAILLSDILRVNTEITKAPLSASMIKRYDEHHQDLTLLKALVRQQLPEKYKEIFFDQSKNGYAGYIDGGASQEEFYKFIKPILEKMDGTEELLVKLNREDLLRKQRTFDNGSIPHQIHLGELHAILRRQEDFYPFLKDNREKIEKILTFRIPYYVGPLARGNSRFAWMTRKSEETITPWNFEEVVDKGASAQSFIERMTNFDKNLPNEKVLPKHSLLYEYFTVYNELTKVKYVTEGMRKPAFLSGEQKKAIVDLLFKTNRKVTVKQLKEDYFKKIECFDSVEISGVEDRFNASLGTYHDLLKIIKDKDFLDNEENEDILEDIVLTLTLFEDREMIEERLKTYAHLFDDKVMKQLKRRRYTGWGRLSRKLINGIRDKQSGKTILDFLKSDGFANRNFMQLIHDDSLTFKEDIQKAQVSGQGDSLHEHIANLAGSPAIKKGILQTVKVVDELVKVMGRHKPENIVIEMARENQTTQKGQKNSRERMKRIEEGIKELGSQILKEHPVENTQLQNEKLYLYYLQNGRDMYVDQELDINRLSDYDVDHIVPQSFLKDDSIDNKVLTRSDKARGKSDNVPSEEVVKKMKNYWRQLLNAKLITQRKFDNLTKAERGGLSELDKAGFIKRQLVETRQITKHVAQILDSRMNTKYDENDKLIREVKVITLKSKLVSDFRKDFQFYKVREINNYHHAHDAYLNAVVGTALIKKYPKLESEFVYGDYKVYDVRKMIAKSEQEIGKATAKYFFYSNIMNFFKTEITLANGEIRKRPLIETNGETGEIVWDKGRDFATVRKVLSMPQVNIVKKTEVQTGGFSKESILPKRNSDKLIARKKDWDPKKYGGFDSPTVAYSVLVVAKVEKGKSKKLKSVKELLGITIMERSSFEKNPIDFLEAKGYKEVKKDLIIKLPKYSLFELENGRKRMLASAGELQKGNELALPSKYVNFLYLASHYEKLKGSPEDNEQKQLFVEQHKHYLDEIIEQISEFSKRVILADANLDKVLSAYNKHRDKPIREQAENIIHLFTLTNLGAPAAFKYFDTTIDRKRYTSTKEVLDATLIHQSITGLYETRIDLSQLGGDGGGSSGGGPAPGGMNPLQLLQPLPAEIKGTKLLAHWNSGATITCIPESFLEDEQPIKKTLIKTIHGEKQQNVYYVTFKVKGRKVEAEVIASPYEYILLSPTDVPWLTQQPLQLTILVPLQEYQEKILSKTALPEDQKQQLKTLFVKYDNLWQHWENQVGHRKIRPHNIATGDYPPRPQKQYPINPKAKPSIQIVIDDLLKQGVLTPQNSTMNTPVYPVPKPDGRWRMVLDYREVNKTIPLTAAQNQHSAGILATIVRQKYKTTLDLANGFWAHPITPESYWLTAFTWQGKQYCWTRLPQGFLNSPALFNADVVDLLKEIPNVQVYVDDIYLSHDDPKEHVQQLEKVFQILLQAGYVVSLKKSEIGQKTVEFLGFNITKEGRGLTDTFKTKLLNITPPKDLKQLQSILGLLNFARNFIPNFAELVQPLYNLIAPAKGKYIEWSEENTKQLNMVIEALNTASNLEERLPEQRLVIKVNTSPSAGYVRYYNETGKKPIMYLNYVFSKAELKFSMLEKLLTTMHKALIKAMDLAMGQEILVYSPIVSMTKIQKTPLPERKALPIRWITWMTYLEDPRIQFHYDKTLPELKHIPDVYTSSQSPVKHPSQYEGVFYTDGSAIKSPDPTKSNNAGMGIVHATYKPEYQVLNQWSIPLGNHTAQMAEIAAVEFACKKALKIPGPVLVITDSFYVAESANKELPYWKSNGFVNNKKKPLKHISKWKSIAECLSMKPDITIQHEKGISLQIPVFILKGNALADKLATQGSYVVNAGKRTADGSEFEKRTADGSEFESPKKKAKVE

SEQ ID NO: 7386 - protein, 2125 aa, synthetic construct
MPAAKRVKLDGGDKKYSIGLDIGTNSVGWAVITDEYKVPSKKFKVLGNTDRHSIKKNLIGALLFDSGETAEATRLKRTARRRYTRRKNRICYLQEIFSNEMAKVDDSFFHRLEESFLVEEDKKHERHPIFGNIVDEVAYHEKYPTIYHLRKKLVDSTDKADLRLIYLALAHMIKFRGHFLIEGDLNPDNSDVDKLFIQLVQTYNQLFEENPINASGVDAKAILSARLSKSRRLENLIAQLPGEKKNGLFGNLIALSLGLTPNFKSNFDLAEDAKLQLSKDTYDDDLDNLLAQIGDQYADLFLAAKNLSDAILLSDILRVNTEITKAPLSASMIKRYDEHHQDLTLLKALVRQQLPEKYKEIFFDQSKNGYAGYIDGGASQEEFYKFIKPILEKMDGTEELLVKLNREDLLRKQRTFDNGSIPHQIHLGELHAILRRQEDFYPFLKDNREKIEKILTFRIPYYVGPLARGNSRFAWMTRKSEETITPWNFEEVVDKGASAQSFIERMTNFDKNLPNEKVLPKHSLLYEYFTVYNELTKVKYVTEGMRKPAFLSGEQKKAIVDLLFKTNRKVTVKQLKEDYFKKIECFDSVEISGVEDRFNASLGTYHDLLKIIKDKDFLDNEENEDILEDIVLTLTLFEDREMIEERLKTYAHLFDDKVMKQLKRRRYTGWGRLSRKLINGIRDKQSGKTILDFLKSDGFANRNFMQLIHDDSLTFKEDIQKAQVSGQGDSLHEHIANLAGSPAIKKGILQTVKVVDELVKVMGRHKPENIVIEMARENQTTQKGQKNSRERMKRIEEGIKELGSQILKEHPVENTQLQNEKLYLYYLQNGRDMYVDQELDINRLSDYDVDHIVPQSFLKDDSIDNKVLTRSDKARGKSDNVPSEEVVKKMKNYWRQLLNAKLITQRKFDNLTKAERGGLSELDKAGFIKRQLVETRQITKHVAQILDSRMNTKYDENDKLIREVKVITLKSKLVSDFRKDFQFYKVREINNYHHAHDAYLNAVVGTALIKKYPKLESEFVYGDYKVYDVRKMIAKSEQEIGKATAKYFFYSNIMNFFKTEITLANGEIRKRPLIETNGETGEIVWDKGRDFATVRKVLSMPQVNIVKKTEVQTGGFSKESILPKRNSDKLIARKKDWDPKKYGGFDSPTVAYSVLVVAKVEKGKSKKLKSVKELLGITIMERSSFEKNPIDFLEAKGYKEVKKDLIIKLPKYSLFELENGRKRMLASAGELQKGNELALPSKYVNFLYLASHYEKLKGSPEDNEQKQLFVEQHKHYLDEIIEQISEFSKRVILADANLDKVLSAYNKHRDKPIREQAENIIHLFTLTNLGAPAAFKYFDTTIDRKRYTSTKEVLDATLIHQSITGLYETRIDLSQLGGDGGGSSGGGPAPGGLLGRDLLTKLKAQIQFSTEGPQVTWEDRPAMCLVLNLEEEYRLHEKPVPPSIDPSWLQLFPMVWAEKAGMGLANQVPPVVVELKSDASPVAVRQYPMSKEAREGIRPHIQRFLDLGILVPCQSPWNTPLLPVKKPGTNDYRPVQDLREVNKRVQDIHPTVPNPYNLLSSLPPSHTWYSVLDLKDAFFCLKLHPNSQPLFAFEWRDPEKGNTGQLTWTRLPQGFKNSPTLFNEALHRDLASFRALNPQVVMLQYVDDLLVAAPTYRDCKEGTRRLLQELSKLGYRVSAKKAQLCREEVTYLGYLLKGGKRWLTPARKATVMKIPTPTTPRQVREFLGTAGFCRLWIPGFASLAAPLYPLTRPKVPFTWTEAHQEAFGRIKEALLSAPALALPDLTKPFALYVDEKEGVARGVLTQTLGPWRRPVAYLSKKLDPVASGWPTCLKAIAAVALLLKDADKLTLGQNVLVIAPHNLESIVRQPPDRWMTNARMTHYQSLLLNERVSFAPPAILNPATLLPVESDDTPIHICSEILAEETGTRPDLRDQPLPGVPAWYTDGSSFIMDGRRQAGAAIVDNKRTVWASNLPEGTSAQKAELIALTQALRLAEGKSINIYTDSRYAFATAHVHGAIYKQRGWLTSAGKDIKNKEEILALLEAIHLPKRVAIIHCPGHQRGTDPVATGNRKADEAAKQAAQSTRILTETTKNAGKRTADGSEFEKRTADGSEFESPKKKAKVE

SEQ ID NO: 7387 - protein, 2216 aa, synthetic construct
MPAAKRVKLDGGDKKYSIGLDIGTNSVGWAVITDEYKVPSKKFKVLGNTDRHSIKKNLIGALLFDSGETAEATRLKRTARRRYTRRKNRICYLQEIFSNEMAKVDDSFFHRLEESFLVEEDKKHERHPIFGNIVDEVAYHEKYPTIYHLRKKLVDSTDKADLRLIYLALAHMIKFRGHFLIEGDLNPDNSDVDKLFIQLVQTYNQLFEENPINASGVDAKAILSARLSKSRRLENLIAQLPGEKKNGLFGNLIALSLGLTPNFKSNFDLAEDAKLQLSKDTYDDDLDNLLAQIGDQYADLFLAAKNLSDAILLSDILRVNTEITKAPLSASMIKRYDEHHQDLTLLKALVRQQLPEKYKEIFFDQSKNGYAGYIDGGASQEEFYKFIKPILEKMDGTEELLVKLNREDLLRKQRTFDNGSIPHQIHLGELHAILRRQEDFYPFLKDNREKIEKILTFRIPYYVGPLARGNSRFAWMTRKSEETITPWNFEEVVDKGASAQSFIERMTNFDKNLPNEKVLPKHSLLYEYFTVYNELTKVKYVTEGMRKPAFLSGEQKKAIVDLLFKTNRKVTVKQLKEDYFKKIECFDSVEISGVEDRFNASLGTYHDLLKIIKDKDFLDNEENEDILEDIVLTLTLFEDREMIEERLKTYAHLFDDKVMKQLKRRRYTGWGRLSRKLINGIRDKQSGKTILDFLKSDGFANRNFMQLIHDDSLTFKEDIQKAQVSGQGDSLHEHIANLAGSPAIKKGILQTVKVVDELVKVMGRHKPENIVIEMARENQTTQKGQKNSRERMKRIEEGIKELGSQILKEHPVENTQLQNEKLYLYYLQNGRDMYVDQELDINRLSDYDVDHIVPQSFLKDDSIDNKVLTRSDKARGKSDNVPSEEVVKKMKNYWRQLLNAKLITQRKFDNLTKAERGGLSELDKAGFIKRQLVETRQITKHVAQILDSRMNTKYDENDKLIREVKVITLKSKLVSDFRKDFQFYKVREINNYHHAHDAYLNAVVGTALIKKYPKLESEFVYGDYKVYDVRKMIAKSEQEIGKATAKYFFYSNIMNFFKTEITLANGEIRKRPLIETNGETGEIVWDKGRDFATVRKVLSMPQVNIVKKTEVQTGGFSKESILPKRNSDKLIARKKDWDPKKYGGFDSPTVAYSVLVVAKVEKGKSKKLKSVKELLGITIMERSSFEKNPIDFLEAKGYKEVKKDLIIKLPKYSLFELENGRKRMLASAGELQKGNELALPSKYVNFLYLASHYEKLKGSPEDNEQKQLFVEQHKHYLDEIIEQISEFSKRVILADANLDKVLSAYNKHRDKPIREQAENIIHLFTLTNLGAPAAFKYFDTTIDRKRYTSTKEVLDATLIHQSITGLYETRIDLSQLGGDGGGSSGGGPAPGGTLGDQGSRGSDPLPEPRVTLTVEGIPTEFLVNTGAEHSVLTKPMGKMGSKRTVVAGATGSKVYPWTTKRLLKIGQKQVTHSFLVIPECPAPLLGRDLLTKLKAQIQFSTEGPQVTWEDRPAMCLVLNLEEEYRLHEKPVPPSIDPSWLQLFPMVWAEKAGMGLANQVPPVVVELKSDASPVAVRQYPMSKEAREGIRPHIQRFLDLGILVPCQSPWNTPLLPVKKPGTNDYRPVQDLREVNKRVQDIHPTVPNPYNLLSSLPPSHTWYSVLDLKDAFFCLKLHPNSQPLFAFEWRDPEKGNTGQLTWTRLPQGFKNSPTLFNEALHRDLASFRALNPQVVMLQYVDDLLVAAPTYRDCKEGTRRLLQELSKLGYRVSAKKAQLCREEVTYLGYLLKGGKRWLTPARKATVMKIPTPTTPRQVREFLGTAGFCRLWIPGFASLAAPLYPLTRPKVPFTWTEAHQEAFGRIKEALLSAPALALPDLTKPFALYVDEKEGVARGVLTQTLGPWRRPVAYLSKKLDPVASGWPTCLKAIAAVALLLKDADKLTLGQNVLVIAPHNLESIVRQPPDRWMTNARMTHYQSLLLNERVSFAPPAILNPATLLPVESDDTPIHICSEILAEETGTRPDLRDQPLPGVPAWYTDGSSFIMDGRRQAGAAIVDNKRTVWASNLPEGTSAQKAELIALTQALRLAEGKSINIYTDSRYAFATAHVHGAIYKQRGWLTSAGKDIKNKEEILALLEAIHLPKRVAIIHCPGHQRGTDPVATGNRKADEAAKQAAQSTRILTETTKNAGKRTADGSEFEKRTADGSEFESPKKKAKVE

SEQ ID NO: 7388 - protein, 2216 aa, synthetic construct
MPAAKRVKLDGGDKKYSIGLDIGTNSVGWAVITDEYKVPSKKFKVLGNTDRHSIKKNLIGALLFDSGETAEATRLKRTARRRYTRRKNRICYLQEIFSNEMAKVDDSFFHRLEESFLVEEDKKHERHPIFGNIVDEVAYHEKYPTIYHLRKKLVDSTDKADLRLIYLALAHMIKFRGHFLIEGDLNPDNSDVDKLFIQLVQTYNQLFEENPINASGVDAKAILSARLSKSRRLENLIAQLPGEKKNGLFGNLIALSLGLTPNFKSNFDLAEDAKLQLSKDTYDDDLDNLLAQIGDQYADLFLAAKNLSDAILLSDILRVNTEITKAPLSASMIKRYDEHHQDLTLLKALVRQQLPEKYKEIFFDQSKNGYAGYIDGGASQEEFYKFIKPILEKMDGTEELLVKLNREDLLRKQRTFDNGSIPHQIHLGELHAILRRQEDFYPFLKDNREKIEKILTFRIPYYVGPLARGNSRFAWMTRKSEETITPWNFEEVVDKGASAQSFIERMTNFDKNLPNEKVLPKHSLLYEYFTVYNELTKVKYVTEGMRKPAFLSGEQKKAIVDLLFKTNRKVTVKQLKEDYFKKIECFDSVEISGVEDRFNASLGTYHDLLKIIKDKDFLDNEENEDILEDIVLTLTLFEDREMIEERLKTYAHLFDDKVMKQLKRRRYTGWGRLSRKLINGIRDKQSGKTILDFLKSDGFANRNFMQLIHDDSLTFKEDIQKAQVSGQGDSLHEHIANLAGSPAIKKGILQTVKVVDELVKVMGRHKPENIVIEMARENQTTQKGQKNSRERMKRIEEGIKELGSQILKEHPVENTQLQNEKLYLYYLQNGRDMYVDQELDINRLSDYDVDHIVPQSFLKDDSIDNKVLTRSDKARGKSDNVPSEEVVKKMKNYWRQLLNAKLITQRKFDNLTKAERGGLSELDKAGFIKRQLVETRQITKHVAQILDSRMNTKYDENDKLIREVKVITLKSKLVSDFRKDFQFYKVREINNYHHAHDAYLNAVVGTALIKKYPKLESEFVYGDYKVYDVRKMIAKSEQEIGKATAKYFFYSNIMNFFKTEITLANGEIRKRPLIETNGETGEIVWDKGRDFATVRKVLSMPQVNIVKKTEVQTGGFSKESILPKRNSDKLIARKKDWDPKKYGGFDSPTVAYSVLVVAKVEKGKSKKLKSVKELLGITIMERSSFEKNPIDFLEAKGYKEVKKDLIIKLPKYSLFELENGRKRMLASAGELQKGNELALPSKYVNFLYLASHYEKLKGSPEDNEQKQLFVEQHKHYLDEIIEQISEFSKRVILADANLDKVLSAYNKHRDKPIREQAENIIHLFTLTNLGAPAAFKYFDTTIDRKRYTSTKEVLDATLIHQSITGLYETRIDLSQLGGDGGGSSGGGPAPGGTLGDQGSRGSDPLPEPRVTLTVEGIPTEFLVNTGAEHSVLTKPMGKMGSKRTVVAGATGSKVYPWTTKRLLKIGQKQVTHSFLVIPECPAPLLGRDLLTKLKAQIQFSTEGPQVTWEDRPAMCLVLNLEEEYRLHEKPVPPSIDPSWLQLFPMVWAEKAGMGLANQVPPVVVELKSDASPVAVRQYPMSKEAREGIRPHIQRFLDLGILVPCQSPWNTPLLPVKKPGTNDYRPVQDLREVNKRVQDIHPTVPNPYNLLSSLPPSHTWYSVLDLKDAFFCLKLHPNSQPLFAFEWRDPEKGNTGQLTWTRLPQGFKNSPTLFNEALHRDLASFRALNPQVVMLQYVDDLLVAAPTYRDCKEGTRRLLQELSKLGYRVSAKKAQLCREEVTYLGYLLKGGKRWLTPARKATVMKIPTPTTPRQVREFLGKAGFCRLFIPGFASLAAPLYPLTRPKVPFTWTEAHQEAFGRIKEALLSAPALALPDLTKPFALYVDEKEGVARGVLTQTLGPWRRPVAYLSKKLDPVASGWPTCLKAIAAVALLLKDADKLTLGQNVLVIAPHNLESIVRQPPDRWMTNARMTHYQSLLLNERVSFAPPAILNPATLLPVESDDTPIHICSEILAEETGTRPDLRDQPLPGVPAWYTDGSSFIMDGRRQAGAAIVDNKRTVWASNLPEGTSAQKAELIALTQALRLAEGKSINIYTDSRYAFATAHVHGAIYKQRGWLTSAGKDIKNKEEILALLEAIHLPKRVAIIHCPGHQRGTDPVATGNRKADEAAKQAAQSTRILTETTKNAGKRTADGSEFEKRTADGSEFESPKKKAKVE

SEQ ID NO: 7389 - protein, 2094 aa, synthetic construct
MPAAKRVKLDGGDKKYSIGLDIGTNSVGWAVITDEYKVPSKKFKVLGNTDRHSIKKNLIGALLFDSGETAEATRLKRTARRRYTRRKNRICYLQEIFSNEMAKVDDSFFHRLEESFLVEEDKKHERHPIFGNIVDEVAYHEKYPTIYHLRKKLVDSTDKADLRLIYLALAHMIKFRGHFLIEGDLNPDNSDVDKLFIQLVQTYNQLFEENPINASGVDAKAILSARLSKSRRLENLIAQLPGEKKNGLFGNLIALSLGLTPNFKSNFDLAEDAKLQLSKDTYDDDLDNLLAQIGDQYADLFLAAKNLSDAILLSDILRVNTEITKAPLSASMIKRYDEHHQDLTLLKALVRQQLPEKYKEIFFDQSKNGYAGYIDGGASQEEFYKFIKPILEKMDGTEELLVKLNREDLLRKQRTFDNGSIPHQIHLGELHAILRRQEDFYPFLKDNREKIEKILTFRIPYYVGPLARGNSRFAWMTRKSEETITPWNFEEVVDKGASAQSFIERMTNFDKNLPNEKVLPKHSLLYEYFTVYNELTKVKYVTEGMRKPAFLSGEQKKAIVDLLFKTNRKVTVKQLKEDYFKKIECFDSVEISGVEDRFNASLGTYHDLLKIIKDKDFLDNEENEDILEDIVLTLTLFEDREMIEERLKTYAHLFDDKVMKQLKRRRYTGWGRLSRKLINGIRDKQSGKTILDFLKSDGFANRNFMQLIHDDSLTFKEDIQKAQVSGQGDSLHEHIANLAGSPAIKKGILQTVKVVDELVKVMGRHKPENIVIEMARENQTTQKGQKNSRERMKRIEEGIKELGSQILKEHPVENTQLQNEKLYLYYLQNGRDMYVDQELDINRLSDYDVDHIVPQSFLKDDSIDNKVLTRSDKARGKSDNVPSEEVVKKMKNYWRQLLNAKLITQRKFDNLTKAERGGLSELDKAGFIKRQLVETRQITKHVAQILDSRMNTKYDENDKLIREVKVITLKSKLVSDFRKDFQFYKVREINNYHHAHDAYLNAVVGTALIKKYPKLESEFVYGDYKVYDVRKMIAKSEQEIGKATAKYFFYSNIMNFFKTEITLANGEIRKRPLIETNGETGEIVWDKGRDFATVRKVLSMPQVNIVKKTEVQTGGFSKESILPKRNSDKLIARKKDWDPKKYGGFDSPTVAYSVLVVAKVEKGKSKKLKSVKELLGITIMERSSFEKNPIDFLEAKGYKEVKKDLIIKLPKYSLFELENGRKRMLASAGELQKGNELALPSKYVNFLYLASHYEKLKGSPEDNEQKQLFVEQHKHYLDEIIEQISEFSKRVILADANLDKVLSAYNKHRDKPIREQAENIIHLFTLTNLGAPAAFKYFDTTIDRKRYTSTKEVLDATLIHQSITGLYETRIDLSQLGGDGGGSSGGGPAPGGTLNLEDEYRLYETSAEPEVSPGSTWLSDFPQAWAETGGMGLAVRQAPLIIPLKATSTPVSIKQYPMSQEAKLGIKPHIQRLLDQGILVPCQSPWNTPLLPVKKPGTNDYRPVQDLREVNKRVEDIHPTVPNPYNLLSGLPPSHRWYTVLDLKDAFFCLRLHPTSQPLFAFEWRDPGMGISGQLTWTRLPQGFKNSPTLFNEALHRDLADFRIQHPDLILLQYVDDILLAATSELDCQQGTRALLLTLGNLGYRASAKKAQLCQKQVKYLGYLLKEGQRWLTEARKETVMGQPTPKTPRQLREFLGKAGFCRLFIPGFAEMAAPLYPLTKPGTLFNWGPDQQKAYQEIKQALLTAPALGLPDLTKPFELFVDEKQGYAKGVLTQKLGPWRRPVAYLSKKLDPVAAGWPPCLRMVAAIAVLRKDAGKLTMGQPLVILAPHAVEALVKQPPDRWLSNARMTHYQAMLLDTDRVQFGPVVALNPATLLPLPEEGAPHDCLEILAETHGTRPDLTDQPIPDADHTWYTDGSSFLQEGQRKAGAAVTTETEVIWARALPAGTSAQRAELIALTQALKMAEGKRLNVYTDSRYAFATAHIHGEIYRRRGWLTSEGREIKNKSEILALLKALFLPKRLSIIHCLGHQKGDSAEARGNRLADQAAREAAIKTPPDTSTLLAGKRTADGSEFEKRTADGSEFESPKKKAKVE

SEQ ID NO: 7390 - protein, 2094 aa, synthetic construct
MPAAKRVKLDGGDKKYSIGLDIGTNSVGWAVITDEYKVPSKKFKVLGNTDRHSIKKNLIGALLFDSGETAEATRLKRTARRRYTRRKNRICYLQEIFSNEMAKVDDSFFHRLEESFLVEEDKKHERHPIFGNIVDEVAYHEKYPTIYHLRKKLVDSTDKADLRLIYLALAHMIKFRGHFLIEGDLNPDNSDVDKLFIQLVQTYNQLFEENPINASGVDAKAILSARLSKSRRLENLIAQLPGEKKNGLFGNLIALSLGLTPNFKSNFDLAEDAKLQLSKDTYDDDLDNLLAQIGDQYADLFLAAKNLSDAILLSDILRVNTEITKAPLSASMIKRYDEHHQDLTLLKALVRQQLPEKYKEIFFDQSKNGYAGYIDGGASQEEFYKFIKPILEKMDGTEELLVKLNREDLLRKQRTFDNGSIPHQIHLGELHAILRRQEDFYPFLKDNREKIEKILTFRIPYYVGPLARGNSRFAWMTRKSEETITPWNFEEVVDKGASAQSFIERMTNFDKNLPNEKVLPKHSLLYEYFTVYNELTKVKYVTEGMRKPAFLSGEQKKAIVDLLFKTNRKVTVKQLKEDYFKKIECFDSVEISGVEDRFNASLGTYHDLLKIIKDKDFLDNEENEDILEDIVLTLTLFEDREMIEERLKTYAHLFDDKVMKQLKRRRYTGWGRLSRKLINGIRDKQSGKTILDFLKSDGFANRNFMQLIHDDSLTFKEDIQKAQVSGQGDSLHEHIANLAGSPAIKKGILQTVKVVDELVKVMGRHKPENIVIEMARENQTTQKGQKNSRERMKRIEEGIKELGSQILKEHPVENTQLQNEKLYLYYLQNGRDMYVDQELDINRLSDYDVDHIVPQSFLKDDSIDNKVLTRSDKARGKSDNVPSEEVVKKMKNYWRQLLNAKLITQRKFDNLTKAERGGLSELDKAGFIKRQLVETRQITKHVAQILDSRMNTKYDENDKLIREVKVITLKSKLVSDFRKDFQFYKVREINNYHHAHDAYLNAVVGTALIKKYPKLESEFVYGDYKVYDVRKMIAKSEQEIGKATAKYFFYSNIMNFFKTEITLANGEIRKRPLIETNGETGEIVWDKGRDFATVRKVLSMPQVNIVKKTEVQTGGFSKESILPKRNSDKLIARKKDWDPKKYGGFDSPTVAYSVLVVAKVEKGKSKKLKSVKELLGITIMERSSFEKNPIDFLEAKGYKEVKKDLIIKLPKYSLFELENGRKRMLASAGELQKGNELALPSKYVNFLYLASHYEKLKGSPEDNEQKQLFVEQHKHYLDEIIEQISEFSKRVILADANLDKVLSAYNKHRDKPIREQAENIIHLFTLTNLGAPAAFKYFDTTIDRKRYTSTKEVLDATLIHQSITGLYETRIDLSQLGGDGGGSSGGGPAPGGLGIEDEYRLHETSTEPDVSLGSTWLSDFPQAWAETGGMGLAVRQAPLIIPLKATSTPVSIQQYPMSHEARLGIKPHIQRLLDQGILVPCQSPWNTPLLPVKKPGTNDYRPVQDLREVNKRVEDIHPTVPNPYNLLSGLPPSHQWYTVLDLKDAFFCLRLHPTSQPLFAFEWRDPGMGISGQLTWTRLPQGFKNSPTLFNEALHRDLADFRIQHPDLILLQYVDDILLAATSELDCQQGTRALLQTLGDLGYRASAKKAQICQKQVKYLGYLLREGQRWLTEARKETVMGQPVPKTPRQLREFLGKAGFCRLFIPGFAEMAAPLYPLTKPGTLFSWGPDQQKAYQEIKQALLTAPALGLPDLTKPFELFVDEKQGYAKGVLTQKLGPWRRPVAYLSKKLDPVAAGWPPCLRMVAAIAVLTKDAGKLTMGQPLVILAPHAVEALVKQPPDRWLSNARMTHYQAMLLDTDRVQFGPVVALNPATLLPLPEEGAPHDCLEILAETHGTRPDLTDQPIPDADHTWYTDGSSFLQEGQRKAGAAVTTETEVIWAGALPAGTSAQRAELIALTQALKMAEGKRLNVYTDSRYAFATAHIHGEIYRRRGWLTSEGREIKNKSEILALLKALFLPKRLSIIHCLGHQKGDSAEARGNRLADQAAREAAIKTPPDTSTLLIAGKRTADGSEFEKRTADGSEFESPKKKAKVE

SEQ ID NO: 7391 - protein, 2094 aa, synthetic construct; identical to SEQ ID NO: 7390

SEQ ID NO: 7392 - protein, 2094 aa, synthetic construct
MPAAKRVKLDGGDKKYSIGLDIGTNSVGWAVITDEYKVPSKKFKVLGNTDRHSIKKNLIGALLFDSGETAEATRLKRTARRRYTRRKNRICYLQEIFSNEMAKVDDSFFHRLEESFLVEEDKKHERHPIFGNIVDEVAYHEKYPTIYHLRKKLVDSTDKADLRLIYLALAHMIKFRGHFLIEGDLNPDNSDVDKLFIQLVQTYNQLFEENPINASGVDAKAILSARLSKSRRLENLIAQLPGEKKNGLFGNLIALSLGLTPNFKSNFDLAEDAKLQLSKDTYDDDLDNLLAQIGDQYADLFLAAKNLSDAILLSDILRVNTEITKAPLSASMIKRYDEHHQDLTLLKALVRQQLPEKYKEIFFDQSKNGYAGYIDGGASQEEFYKFIKPILEKMDGTEELLVKLNREDLLRKQRTFDNGSIPHQIHLGELHAILRRQEDFYPFLKDNREKIEKILTFRIPYYVGPLARGNSRFAWMTRKSEETITPWNFEEVVDKGASAQSFIERMTNFDKNLPNEKVLPKHSLLYEYFTVYNELTKVKYVTEGMRKPAFLSGEQKKAIVDLLFKTNRKVTVKQLKEDYFKKIECFDSVEISGVEDRFNASLGTYHDLLKIIKDKDFLDNEENEDILEDIVLTLTLFEDREMIEERLKTYAHLFDDKVMKQLKRRRYTGWGRLSRKLINGIRDKQSGKTILDFLKSDGFANRNFMQLIHDDSLTFKEDIQKAQVSGQGDSLHEHIANLAGSPAIKKGILQTVKVVDELVKVMGRHKPENIVIEMARENQTTQKGQKNSRERMKRIEEGIKELGSQILKEHPVENTQLQNEKLYLYYLQNGRDMYVDQELDINRLSDYDVDHIVPQSFLKDDSIDNKVLTRSDKARGKSDNVPSEEVVKKMKNYWRQLLNAKLITQRKFDNLTKAERGGLSELDKAGFIKRQLVETRQITKHVAQILDSRMNTKYDENDKLIREVKVITLKSKLVSDFRKDFQFYKVREINNYHHAHDAYLNAVVGTALIKKYPKLESEFVYGDYKVYDVRKMIAKSEQEIGKATAKYFFYSNIMNFFKTEITLANGEIRKRPLIETNGETGEIVWDKGRDFATVRKVLSMPQVNIVKKTEVQTGGFSKESILPKRNSDKLIARKKDWDPKKYGGFDSPTVAYSVLVVAKVEKGKSKKLKSVKELLGITIMERSSFEKNPIDFLEAKGYKEVKKDLIIKLPKYSLFELENGRKRMLASAGELQKGNELALPSKYVNFLYLASHYEKLKGSPEDNEQKQLFVEQHKHYLDEIIEQISEFSKRVILADANLDKVLSAYNKHRDKPIREQAENIIHLFTLTNLGAPAAFKYFDTTIDRKRYTSTKEVLDATLIHQSITGLYETRIDLSQLGGDGGGSSGGGPAPGGTLNIEDEYRLHETSKGPDVPLGSTWLSDFPQAWAETGGMGLAFRQAPLIISLKATSTPVSIKQYPMSQEARLGIKPHIQRLLDQGILVPCQSPWNTPLLPVKKPGTNDYRPVQDLREVNKRVEDIHPTVPNPYNLLSGLPPSHQWYTVLDLKDAFFCLRLHPTSQSLFAFEWKDPEMGISGQLTWTRLPQGFKNSPTLFNEALHRDLADFRIQHPDLILLQYVDDLLLAATSELDCQQGTRALLQTLGDLGYRASAKKAQICQKQVKYLGYLLKEGQRWLTEARKETVMGQPTPKTPRQLREFLGKAGLCRLFIPGFAEMAAPLYPLTKPGTLFKWGPDQQKAYQEIKQALLTAPALGLPDLTKPFELFVDEKQGYAKGVLTQKLGPWRRPVAYLSKKLDPVAAGWPPCLRMVAAIAVLTKDVGKLTMGQPLVILAPHAVEALVKQPPDRWLSNARMTHYQALLLDTDRVQFGPIVALNPATLLPLPEEGLQHDCLDILAEAHGTRPDLTDQPLPDADHTWYTDGSSFLQEGQRRAGAAVTTETEVIWAKALPAGTSAQRAELIALTQALKMAAGKKLNVYTDSRYAFATAHIHGEIYRRRGWLTSEGKEIKNKDEILALLKALFLPKRLSIIHCPGHQKGNHAEARGNRMADQAAREVATRETPETSTLLAGKRTADGSEFEKRTADGSEFESPKKKAKVE

SEQ ID NO: 7393 - protein, 2094 aa, synthetic construct
MPAAKRVKLDGGDKKYSIGLDIGTNSVGWAVITDEYKVPSKKFKVLGNTDRHSIKKNLIGALLFDSGETAEATRLKRTARRRYTRRKNRICYLQEIFSNEMAKVDDSFFHRLEESFLVEEDKKHERHPIFGNIVDEVAYHEKYPTIYHLRKKLVDSTDKADLRLIYLALAHMIKFRGHFLIEGDLNPDNSDVDKLFIQLVQTYNQLFEENPINASGVDAKAILSARLSKSRRLENLIAQLPGEKKNGLFGNLIALSLGLTPNFKSNFDLAEDAKLQLSKDTYDDDLDNLLAQIGDQYADLFLAAKNLSDAILLSDILRVNTEITKAPLSASMIKRYDEHHQDLTLLKALVRQQLPEKYKEIFFDQSKNGYAGYIDGGASQEEFYKFIKPILEKMDGTEELLVKLNREDLLRKQRTFDNGSIPHQIHLGELHAILRRQEDFYPFLKDNREKIEKILTFRIPYYVGPLARGNSRFAWMTRKSEETITPWNFEEVVDKGASAQSFIERMTNFDKNLPNEKVLPKHSLLYEYFTVYNELTKVKYVTEGMRKPAFLSGEQKKAIVDLLFKTNRKVTVKQLKEDYFKKIECFDSVEISGVEDRFNASLGTYHDLLKIIKDKDFLDNEENEDILEDIVLTLTLFEDREMIEERLKTYAHLFDDKVMKQLKRRRYTGWGRLSRKLINGIRDKQSGKTILDFLKSDGFANRNFMQLIHDDSLTFKEDIQKAQVSGQGDSLHEHIANLAGSPAIKKGILQTVKVVDELVKVMGRHKPENIVIEMARENQTTQKGQKNSRERMKRIEEGIKELGSQILKEHPVENTQLQNEKLYLYYLQNGRDMYVDQELDINRLSDYDVDHIVPQSFLKDDSIDNKVLTRSDKARGKSDNVPSEEVVKKMKNYWRQLLNAKLITQRKFDNLTKAERGGLSELDKAGFIKRQLVETRQITKHVAQILDSRMNTKYDENDKLIREVKVITLKSKLVSDFRKDFQFYKVREINNYHHAHDAYLNAVVGTALIKKYPKLESEFVYGDYKVYDVRKMIAKSEQEIGKATAKYFFYSNIMNFFKTEITLANGEIRKRPLIETNGETGEIVWDKGRDFATVRKVLSMPQVNIVKKTEVQTGGFSKESILPKRNSDKLIARKKDWDPKKYGGFDSPTVAYSVLVVAKVEKGKSKKLKSVKELLGITIMERSSFEKNPIDFLEAKGYKEVKKDLIIKLPKYSLFELENGRKRMLASAGELQKGNELALPSKYVNFLYLASHYEKLKGSPEDNEQKQLFVEQHKHYLDEIIEQISEFSKRVILADANLDKVLSAYNKHRDKPIREQAENIIHLFTLTNLGAPAAFKYFDTTIDRKRYTSTKEVLDATLIHQSITGLYETRIDLSQLGGDGGGSSGGGPAPGGTLNIEDEHRLHETSKEPDVSLGSTWLSDFPQAWAETGGMGLAVRQAPLIIPLKATSTPVSIKQYPMSQEARLGIKPHIQRLLDQGILVPCQSPWNTPLLPVKKPGTNDYRPVQDLREVNKRVEDIHPTVPNPYNLLSGLPPSHQWYTVLDLKDAFFCLRLHPTSQPLFAFEWRDPEMGISGQLTWTRLPQGFKNSPTLFNEALHRDLADFRIQHPDLILLQYVDDLLLAATSELDCQQGTRALLQTLGNLGYRASAKKAQICQKQVKYLGYLLKEGQRWLTEARKETVMGQPTPKTPRQLREFLGTAGFCRLWIPGFAEMAAPLYPLTKPGTLFNWGPDQQKAYQEIKQALLTAPALGLPDLTKPFELFVDEKQGYAKGVLTQKLGPWRRPVAYLSKKLDPVAAGWPPCLRMVAAIAVLTKDAGKLTMGQPLVILAPHAVEALVKQPPDRWLSNARMTHYQALLLDTDRVQFGPVVALNPATLLPLPEEGLQHNCLDILAEAHGTRPDLTDQPLPDADHTWYTDGSSLLQEGQRKAGAAVTTETEVIWAKALPAGTSAQRAELIALTQALKMAEGKKLNVYTDSRYAFATAHIHGEIYRRRGWLTSEGKEIKNKDEILALLKALFLPKRLSIIHCPGHQKGHSAEARGNRMADQAARKAAITETPDTSTLLAGKRTADGSEFEKRTADGSEFESPKKKAKVE

SEQ ID NO: 7394 - protein, 2094 aa, synthetic construct; identical to SEQ ID NO: 7393

SEQ ID NO: 7395 - protein, 2088 aa, synthetic construct; identical to SEQ ID NO: 4532

SEQ ID NO: 7396 - protein, 2088 aa, synthetic construct
MPAAKRVKLDGGDKKYSIGLDIGTNSVGWAVITDEYKVPSKKFKVLGNTDRHSIKKNLIGALLFDSGETAEATRLKRTARRRYTRRKNRICYLQEIFSNEMAKVDDSFFHRLEESFLVEEDKKHERHPIFGNIVDEVAYHEKYPTIYHLRKKLVDSTDKADLRLIYLALAHMIKFRGHFLIEGDLNPDNSDVDKLFIQLVQTYNQLFEENPINASGVDAKAILSARLSKSRRLENLIAQLPGEKKNGLFGNLIALSLGLTPNFKSNFDLAEDAKLQLSKDTYDDDLDNLLAQIGDQYADLFLAAKNLSDAILLSDILRVNTEITKAPLSASMIKRYDEHHQDLTLLKALVRQQLPEKYKEIFFDQSKNGYAGYIDGGASQEEFYKFIKPILEKMDGTEELLVKLNREDLLRKQRTFDNGSIPHQIHLGELHAILRRQEDFYPFLKDNREKIEKILTFRIPYYVGPLARGNSRFAWMTRKSEETITPWNFEEVVDKGASAQSFIERMTNFDKNLPNEKVLPKHSLLYEYFTVYNELTKVKYVTEGMRKPAFLSGEQKKAIVDLLFKTNRKVTVKQLKEDYFKKIECFDSVEISGVEDRFNASLGTYHDLLKIIKDKDFLDNEENEDILEDIVLTLTLFEDREMIEERLKTYAHLFDDKVMKQLKRRRYTGWGRLSRKLINGIRDKQSGKTILDFLKSDGFANRNFMQLIHDDSLTFKEDIQKAQVSGQGDSLHEHIANLAGSPAIKKGILQTVKVVDELVKVMGRHKPENIVIEMARENQTTQKGQKNSRERMKRIEEGIKELGSQILKEHPVENTQLQNEKLYLYYLQNGRDMYVDQELDINRLSDYDVDHIVPQSFLKDDSIDNKVLTRSDKARGKSDNVPSEEVVKKMKNYWRQLLNAKLITQRKFDNLTKAERGGLSELDKAGFIKRQLVETRQITKHVAQILDSRMNTKYDENDKLIREVKVITLKSKLVSDFRKDFQFYKVREINNYHHAHDAYLNAVVGTALIKKYPKLESEFVYGDYKVYDVRKMIAKSEQEIGKATAKYFFYSNIMNFFKTEITLANGEIRKRPLIETNGETGEIVWDKGRDFATVRKVLSMPQVNIVKKTEVQTGGFSKESILPKRNSDKLIARKKDWDPKKYGGFDSPTVAYSVLVVAKVEKGKSKKLKSVKELLGITIMERSSFEKNPIDFLEAKGYKEVKKDLIIKLPKYSLFELENGRKRMLASAGELQKGNELALPSKYVNFLYLASHYEKLKGSPEDNEQKQLFVEQHKHYLDEIIEQISEFSKRVILADANLDKVLSAYNKHRDKPIREQAENIIHLFTLTNLGAPAAFKYFDTTIDRKRYTSTKEVLDATLIHQSITGLYETRIDLSQLGGDGGGSSGGGPAPGGTLQLDDEYRLYSPLVKPDQNIQFWLEQFPQAWAETAGMGLAKQVPPQVIQLKASATPVSVRQYPLSKEAQEGIRPHVQRLIQQGILVPVQSPWNTPLLPVRKPGTNDYRPVQDLREVNKRVQDIHPTVPNPYNLLCALPPQRSWYTVLDLKDAFFCLRLHPTSQPLFAFEWRDPGTGRTGQLTWTRLPQGFKNSPTIFDEALHRDLANFRIQHPQVTLLQYVDDLLLAGATKQDCLEGTKALLLELSDLGYRASAKKAQICRREVTYLGYSLRDGQRWLTEARKKTVVQIPAPTTAKQVREFLGTAGFCRLWIPGFATLAAPLYPLTKEKGEFSWAPEHQKAFDAIKKALLSAPALALPDVTKPFTLYVDERKGVARGVLTQTLGPWRRPVAYLSKKLDPVASGWPVCLKAIAAVAILVKDADKLTLGQNITVIAPHALENIVRQPPDRWMTNARMTHYQSLLLTERVTFAPPAALNPATLLPEETDEPVTHDCHQLLIEETGVRKDLTDIPLTGEVLTWFTDGSSYVVEGKRMAGAAVVDGTRTIWASSLPEGTSAQKAELMALTQALRLAEGKSINIYTDSRYAFATAHVHGAIYKQRGLLTSAGREIKNKEEILSLLEALHLPKRLAIIHCPGHQKAKDPISRGNQMADRVAKQAAQGVNLLAGKRTADGSEFEKRTADGSEFESPKKKAKVE

SEQ ID NO: 7397 - protein, 2088 aa, synthetic construct; identical to SEQ ID NO: 4532

SEQ ID NO: 7398 - protein, 2085 aa, synthetic construct
MPAAKRVKLDGGDKKYSIGLDIGTNSVGWAVITDEYKVPSKKFKVLGNTDRHSIKKNLIGALLFDSGETAEATRLKRTARRRYTRRKNRICYLQEIFSNEMAKVDDSFFHRLEESFLVEEDKKHERHPIFGNIVDEVAYHEKYPTIYHLRKKLVDSTDKADLRLIYLALAHMIKFRGHFLIEGDLNPDNSDVDKLFIQLVQTYNQLFEENPINASGVDAKAILSARLSKSRRLENLIAQLPGEKKNGLFGNLIALSLGLTPNFKSNFDLAEDAKLQLSKDTYDDDLDNLLAQIGDQYADLFLAAKNLSDAILLSDILRVNTEITKAPLSASMIKRYDEHHQDLTLLKALVRQQLPEKYKEIFFDQSKNGYAGYIDGGASQEEFYKFIKPILEKMDGTEELLVKLNREDLLRKQRTFDNGSIPHQIHLGELHAILRRQEDFYPFLKDNREKIEKILTFRIPYYVGPLARGNSRFAWMTRKSEETITPWNFEEVVDKGASAQSFIERMTNFDKNLPNEKVLPKHSLLYEYFTVYNELTKVKYVTEGMRKPAFLSGEQKKAIVDLLFKTNRKVTVKQLKEDYFKKIECFDSVEISGVEDRFNASLGTYHDLLKIIKDKDFLDNEENEDILEDIVLTLTLFEDREMIEERLKTYAHLFDDKVMKQLKRRRYTGWGRLSRKLINGIRDKQSGKTILDFLKSDGFANRNFMQLIHDDSLTFKEDIQKAQVSGQGDSLHEHIANLAGSPAIKKGILQTVKVVDELVKVMGRHKPENIVIEMARENQTTQKGQKNSRERMKRIEEGIKELGSQILKEHPVENTQLQNEKLYLYYLQNGRDMYVDQELDINRLSDYDVDHIVPQSFLKDDSIDNKVLTRSDKARGKSDNVPSEEVVKKMKNYWRQLLNAKLITQRKFDNLTKAERGGLSELDKAGFIKRQLVETRQITKHVAQILDSRMNTKYDENDKLIREVKVITLKSKLVSDFRKDFQFYKVREINNYHHAHDAYLNAVVGTALIKKYPKLESEFVYGDYKVYDVRKMIAKSEQEIGKATAKYFFYSNIMNFFKTEITLANGEIRKRPLIETNGETGEIVWDKGRDFATVRKVLSMPQVNIVKKTEVQTGGFSKESILPKRNSDKLIARKKDWDPKKYGGFDSPTVAYSVLVVAKVEKGKSKKLKSVKELLGITIMERSSFEKNPIDFLEAKGYKEVKKDLIIKLPKYSLFELENGRKRMLASAGELQKGNELALPSKYVNFLYLASHYEKLKGSPEDNEQKQLFVEQHKHYLDEIIEQISEFSKRVILADANLDKVLSAYNKHRDKPIREQAENIIHLFTLTNLGAPAAFKYFDTTIDRKRYTSTKEVLDATLIHQSITGLYETRIDLSQLGGDGGGSSGGGPAPGGIPWLMKKPLQLTTLVPLQEYEERLLKQTMLTGSYKEKLQSLFLKYDALWQHWENQVGHRRIKPHHIATGTVNPRPQKQYPINPKAKASIQTVINDLLKQGVLIQQNSIMNTPVYPVPKPDGKWRMVLDYREVNKTIPLIAAQNQHSAGILSSIFRGKYKTTLDLSNGFWAHSITPESYWLTAFTWLGQQYCWTRLPQGFLNSPALFNADVVDLLKEVPNVQVYVDDIYISHDDPREHLEQLEKVFSLLLNAGYVVSLKKSEIAQHEVEFLGFNITKEGRGLTETFKQKLLNITPPRDLKQLQSILGKLNFARNFIPNFSELVKPLYNIIATAPGKYITWTTDNSQQLQNIISMLNSAENLEERNPEVRLIMKVNTSPSAGYIRFYNEFAKRPIMYLNYVYTKAEVKFTNTEKLLTTIHKGLIKALDLGMGQEILVYSPIVSMTKIQKTPLPERKALPIRWITWMSYLEDPRIQFHYDKTLPELQQVPTVTDDIIAKIKHPSEFSMVFYTDGSAIKHPNVNKSHNAGMGIAQVQFKPEFTVINTWSIPLGDHTAQLAEVAAVEFACKKALKIDGPVLIVTDSFYVAESVNKELPYWQSNGFFNNKKKPLKHVSKWKSIADCIQLKPDIIIIHEKGHQPTASTFHTEGNNLADKLATQGSYVVNAGKRTADGSEFEKRTADGSEFESPKKKAKVE

SEQ ID NO: 7399 - protein, 2174 aa, synthetic construct
MPAAKRVKLDGGDKKYSIGLDIGTNSVGWAVITDEYKVPSKKFKVLGNTDRHSIKKNLIGALLFDSGETAEATRLKRTARRRYTRRKNRICYLQEIFSNEMAKVDDSFFHRLEESFLVEEDKKHERHPIFGNIVDEVAYHEKYPTIYHLRKKLVDSTDKADLRLIYLALAHMIKFRGHFLIEGDLNPDNSDVDKLFIQLVQTYNQLFEENPINASGVDAKAILSARLSKSRRLENLIAQLPGEKKNGLFGNLIALSLGLTPNFKSNFDLAEDAKLQLSKDTYDDDLDNLLAQIGDQYADLFLAAKNLSDAILLSDILRVNTEITKAPLSASMIKRYDEHHQDLTLLKALVRQQLPEKYKEIFFDQSKNGYAGYIDGGASQEEFYKFIKPILEKMDGTEELLVKLNREDLLRKQRTFDNGSIPHQIHLGELHAILRRQEDFYPFLKDNREKIEKILTFRIPYYVGPLARGNSRFAWMTRKSEETITPWNFEEVVDKGASAQSFIERMTNFDKNLPNEKVLPKHSLLYEYFTVYNELTKVKYVTEGMRKPAFLSGEQKKAIVDLLFKTNRKVTVKQLKEDYFKKIECFDSVEISGVEDRFNASLGTYHDLLKIIKDKDFLDNEENEDILEDIVLTLTLFEDREMIEERLKTYAHLFDDKVMKQLKRRRYTGWGRLSRKLINGIRDKQSGKTILDFLKSDGFANRNFMQLIHDDSLTFKEDIQKAQVSGQGDSLHEHIANLAGSPAIKKGILQTVKVVDELVKVMGRHKPENIVIEMARENQTTQKGQKNSRERMKRIEEGIKELGSQILKEHPVENTQLQNEKLYLYYLQNGRDMYVDQELDINRLSDYDVDHIVPQSFLKDDSIDNKVLTRSDKARGKSDNVPSEEVVKKMKNYWRQLLNAKLITQRKFDNLTKAERGGLSELDKAGFIKRQLVETRQITKHVAQILDSRMNTKYDENDKLIREVKVITLKSKLVSDFRKDFQFYKVREINNYHHAHDAYLNAVVGTALIKKYPKLESEFVYGDYKVYDVRKMIAKSEQEIGKATAKYFFYSNIMNFFKTEITLANGEIRKRPLIETNGETGEIVWDKGRDFATVRKVLSMPQVNIVKKTEVQTGGFSKESILPKRNSDKLIARKKDWDPKKYGGFDSPTVAYSVLVVAKVEKGKSKKLKSVKELLGITIMERSSFEKNPIDFLEAKGYKEVKKDLIIKLPKYSLFELENGRKRMLASAGELQKGNELALPSKYVNFLYLASHYEKLKGSPEDNEQKQLFVEQHKHYLDEIIEQISEFSKRVILADANLDKVLSAYNKHRDKPIREQAENIIHLFTLTNLGAPAAFKYFDTTIDRKRYTSTKEVLDATLIHQSITGLYETRIDLSQLGGDGGGSSGGGPAPGGMDPLQLLQPLEAEIKGTKLKAHWNSGATITCVPQAFLEEEVPIKNIWIKTIHGEKEQPVYYLTFKIQGRKVEAEVISSPYDYILVSPSDIPWLMKKPLQLTTLVPLQEYEERLLKQTMLTGSYKEKLQSLFLKYDALWQHWENQVGHRRIKPHHIATGTVNPRPQKQYPINPKAKASIQTVINDLLKQGVLIQQNSIMNTPVYPVPKPDGKWRMVLDYREVNKTIPLIAAQNQHSAGILSSIFRGKYKTTLDLSNGFWAHSITPESYWLTAFTWLGQQYCWTRLPQGFLNSPALFNADVVDLLKEVPNVQVYVDDIYISHDDPREHLEQLEKVFSLLLNAGYVVSLKKSEIAQHEVEFLGFNITKEGRGLTETFKQKLLNITPPRDLKQLQSILGLLNFARNFIPNFSELVKPLYNIIATAPGKYITWTTDNSQQLQNIISMLNSAENLEERNPEVRLIMKVNTSPSAGYIRFYNEFAKRPIMYLNYVYTKAEVKFTNTEKLLTTIHKGLIKALDLGMGQEILVYSPIVSMTKIQKTPLPERKALPIRWITWMSYLEDPRIQFHYDKTLPELQQVPTVTDDIIAKIKHPSEFSMVFYTDGSAIKHPNVNKSHNAGMGIAQVQFKPEFTVINTWSIPLGDHTAQLAEVAAVEFACKKALKIDGPVLIVTDSFYVAESVNKELPYWQSNGFFNNKKKPLKHVSKWKSIADCIQLKPDIIIIHEKGHQPTASTFHTEGNNLADKLATQGSYVVNAGKRTADGSEFEKRTADGSEFESPKKKAKVE

SEQ ID NO: 7400 - protein, 2092 aa, synthetic construct
MPAAKRVKLDGGDKKYSIGLDIGTNSVGWAVITDEYKVPSKKFKVLGNTDRHSIKKNLIGALLFDSGETAEATRLKRTARRRYTRRKNRICYLQEIFSNEMAKVDDSFFHRLEESFLVEEDKKHERHPIFGNIVDEVAYHEKYPTIYHLRKKLVDSTDKADLRLIYLALAHMIKFRGHFLIEGDLNPDNSDVDKLFIQLVQTYNQLFEENPINASGVDAKAILSARLSKSRRLENLIAQLPGEKKNGLFGNLIALSLGLTPNFKSNFDLAEDAKLQLSKDTYDDDLDNLLAQIGDQYADLFLAAKNLSDAILLSDILRVNTEITKAPLSASMIKRYDEHHQDLTLLKALVRQQLPEKYKEIFFDQSKNGYAGYIDGGASQEEFYKFIKPILEKMDGTEELLVKLNREDLLRKQRTFDNGSIPHQIHLGELHAILRRQEDFYPFLKDNREKIEKILTFRIPYYVGPLARGNSRFAWMTRKSEETITPWNFEEVVDKGASAQSFIERMTNFDKNLPNEKVLPKHSLLYEYFTVYNELTKVKYVTEGMRKPAFLSGEQKKAIVDLLFKTNRKVTVKQLKEDYFKKIECFDSVEISGVEDRFNASLGTYHDLLKIIKDKDFLDNEENEDILEDIVLTLTLFEDREMIEERLKTYAHLFDDKVMKQLKRRRYTGWGRLSRKLINGIRDKQSGKTILDFLKSDGFANRNFMQLIHDDSLTFKEDIQKAQVSGQGDSLHEHIANLAGSPAIKKGILQTVKVVDELVKVMGRHKPENIVIEMARENQTTQKGQKNSRERMKRIEEGIKELGSQILKEHPVENTQLQNEKLYLYYLQNGRDMYVDQELDINRLSDYDVDHIVPQSFLKDDSIDNKVLTRSDKARGKSDNVPSEEVVKKMKNYWRQLLNAKLITQRKFDNLTKAERGGLSELDKAGFIKRQLVETRQITKHVAQILDSRMNTKYDENDKLIREVKVITLKSKLVSDFRKDFQFYKVREINNYHHAHDAYLNAVVGTALIKKYPKLESEFVYGDYKVYDVRKMIAKSEQEIGKATAKYFFYSNIMNFFKTEITLANGEIRKRPLIETNGETGEIVWDKGRDFATVRKVLSMPQVNIVKKTEVQTGGFSKESILPKRNSDKLIARKKDWDPKKYGGFDSPTVAYSVLVVAKVEKGKSKKLKSVKELLGITIMERSSFEKNPIDFLEAKGYKEVKKDLIIKLPKYSLFELENGRKRMLASAGELQKGNELALPSKYVNFLYLASHYEKLKGSPEDNEQKQLFVEQHKHYLDEIIEQISEFSKRVILADANLDKVLSAYNKHRDKPIREQAENIIHLFTLTNLGAPAAFKYFDTTIDRKRYTSTKEVLDATLIHQSITGLYETRIDLSQLGGDGGGSSGGGPAPGGVLNLEEEYRLHEKPVPSSIDPSWLQLFPTVWAERAGMGLANQVPPVVVELRSGASPVAVRQYPMSKEAREGIRPHIQRFLDLGVLVPCQSPWNTPLLPVKKPGTNDYRPVQDLREINKRVQDIHPTVPNPYNLLSSLPPSHTWYSVLDLKDAFFCLKLHPNSQPLFAFEWRDPEKGNTGQLTWTRLPQGFKNSPTLFNEALHRDLAPFRALNPQVVLLQYVDDLLVAAPTYRDCKEGTQKLLQELSKLGYRVSAKKAQLCQKEVTYLGYLLKEGKRWLTPARKATVMKIPPPTTPRQVREFLGKAGFCRLFIPGFASLAAPLYPLTKPSIPFIWTEEHQKAFDRIKEALLSAPALALPDLTKPFTLYVDERAGVARGVLTQTLGPWRRPVAYLSKKLDPVASGWPTCLKAVAAVALLLKDADKLTLGQNVTVIASHSLESIVRQPPDRWMTNARMTHYQSLLLNERVSFAPPAVLNPATLLPVESEATPVHRCSEILAEETGTRRDLKDQPLPGVPAWYTDGSSFIAEGKRRAGAAIVDGKRTVWASSLPEGTSAQKAELVALTQALRLAEGKDINIYTDSRYAFATAHIHGAIYKQRGWLTSAGKDIKNKEEILALLEAIHLPKRVAIIHCPGHQKGNDPVATGNRRADEAAKQAALSTRVLAETTKPAGKRTADGSEFEKRTADGSEFESPKKKAKVE

SEQ ID NO: 7401 - protein, 2094 aa, synthetic construct
MPAAKRVKLDGGDKKYSIGLDIGTNSVGWAVITDEYKVPSKKFKVLGNTDRHSIKKNLIGALLFDSGETAEATRLKRTARRRYTRRKNRICYLQEIFSNEMAKVDDSFFHRLEESFLVEEDKKHERHPIFGNIVDEVAYHEKYPTIYHLRKKLVDSTDKADLRLIYLALAHMIKFRGHFLIEGDLNPDNSDVDKLFIQLVQTYNQLFEENPINASGVDAKAILSARLSKSRRLENLIAQLPGEKKNGLFGNLIALSLGLTPNFKSNFDLAEDAKLQLSKDTYDDDLDNLLAQIGDQYADLFLAAKNLSDAILLSDILRVNTEITKAPLSASMIKRYDEHHQDLTLLKALVRQQLPEKYKEIFFDQSKNGYAGYIDGGASQEEFYKFIKPILEKMDGTEELLVKLNREDLLRKQRTFDNGSIPHQIHLGELHAILRRQEDFYPFLKDNREKIEKILTFRIPYYVGPLARGNSRFAWMTRKSEETITPWNFEEVVDKGASAQSFIERMTNFDKNLPNEKVLPKHSLLYEYFTVYNELTKVKYVTEGMRKPAFLSGEQKKAIVDLLFKTNRKVTVKQLKEDYFKKIECFDSVEISGVEDRFNASLGTYHDLLKIIKDKDFLDNEENEDILEDIVLTLTLFEDREMIEERLKTYAHLFDDKVMKQLKRRRYTGWGRLSRKLINGIRDKQSGKTILDFLKSDGFANRNFMQLIHDDSLTFKEDIQKAQVSGQGDSLHEHIANLAGSPAIKKGILQTVKVVDELVKVMGRHKPENIVIEMARENQTTQKGQKNSRERMKRIEEGIKELGSQILKEHPVENTQLQNEKLYLYYLQNGRDMYVDQELDINRLSDYDVDHIVPQSFLKDDSIDNKVLTRSDKARGKSDNVPSEEVVKKMKNYWRQLLNAKLITQRKFDNLTKAERGGLSELDKAGFIKRQLVETRQITKHVAQILDSRMNTKYDENDKLIREVKVITLKSKLVSDFRKDFQFYKVREINNYHHAHDAYLNAVVGTALIKKYPKLESEFVYGDYKVYDVRKMIAKSEQEIGKATAKYFFYSNIMNFFKTEITLANGEIRKRPLIETNGETGEIVWDKGRDFATVRKVLSMPQVNIVKKTEVQTGGFSKESILPKRNSDKLIARKKDWDPKKYGGFDSPTVAYSVLVVAKVEKGKSKKLKSVKELLGITIMERSSFEKNPIDFLEAKGYKEVKKDLIIKLPKYSLFELENGRKRMLASAGELQKGNELALPSKYVNFLYLASHYEKLKGSPEDNEQKQLFVEQHKHYLDEIIEQISEFSKRVILADANLDKVLSAYNKHRDKPIREQAENIIHLFTLTNLGAPAAFKYFDTTIDRKRYTSTKEVLDATLIHQSITGLYETRIDLSQLGGDGGGSSGGGPAPGGTLNIEDEYRLHETSKEPDVPLGSTWLSDFPQAWAETGGMGLAVRQAPLIIPLKATSTPVSIKQYPMSQEARLGIKPHIQRLLDQGILVPCQSPWNTPLLPVKKPGTNDYRPVQDLREVNKRVEDIHPTVPNPYNLLSGLPPSHQWYTVLDLKDAFFCLRLHPTSQPLFAFEWRDPEMGISGQLTWTRLPQGFKNSPTLFNEALHRDLADFRIQHPDLILLQYVDDLLLAATSEQDCQRGTRALLQTLGNLGYRASAKKAQICQKQVKYLGYLLKEGQRWLTEARKETVMGQPTPKTPRQLREFLGTAGFCRLWIPGFAEMAAPLYPLTKPGTLFNWGPDQQKAYQEIKQALLTAPALGLPDLTKPFELFVDEKQGYAKGVLTQKLGPWRRPVAYLSKKLDPVAAGWPPCLRMVAAIAVLTKDAGKLTMGQPLVILAPHAVEALVKQPPDRWLSNARMTHYQAMLLDTDRVQFGPVVALNPATLLPLPEKEAPHDCLEILAETHGTRPDLTDQPIPDADYTWYTDGSSFLQEGQRRAGAAVTTETEVIWARALPAGTSAQRAELIALTQALKMAEGKKLNVYTDSRYAFATAHVHGEIYRRRGWLTSEGREIKNKNEILALLKALFLPKRLSIIHCPGHQKGNSAEARGNRMADQAAREAAMKAVLETSTLLAGKRTADGSEFEKRTADGSEFESPKKKAKVE

SEQ ID NO: 7402 - protein, 2096 aa, synthetic construct
MPAAKRVKLDGGDKKYSIGLDIGTNSVGWAVITDEYKVPSKKFKVLGNTDRHSIKKNLIGALLFDSGETAEATRLKRTARRRYTRRKNRICYLQEIFSNEMAKVDDSFFHRLEESFLVEEDKKHERHPIFGNIVDEVAYHEKYPTIYHLRKKLVDSTDKADLRLIYLALAHMIKFRGHFLIEGDLNPDNSDVDKLFIQLVQTYNQLFEENPINASGVDAKAILSARLSKSRRLENLIAQLPGEKKNGLFGNLIALSLGLTPNFKSNFDLAEDAKLQLSKDTYDDDLDNLLAQIGDQYADLFLAAKNLSDAILLSDILRVNTEITKAPLSASMIKRYDEHHQDLTLLKALVRQQLPEKYKEIFFDQSKNGYAGYIDGGASQEEFYKFIKPILEKMDGTEELLVKLNREDLLRKQRTFDNGSIPHQIHLGELHAILRRQEDFYPFLKDNREKIEKILTFRIPYYVGPLARGNSRFAWMTRKSEETITPWNFEEVVDKGASAQSFIERMTNFDKNLPNEKVLPKHSLLYEYFTVYNELTKVKYVTEGMRKPAFLSGEQKKAIVDLLFKTNRKVTVKQLKEDYFKKIECFDSVEISGVEDRFNASLGTYHDLLKIIKDKDFLDNEENEDILEDIVLTLTLFEDREMIEERLKTYAHLFDDKVMKQLKRRRYTGWGRLSRKLINGIRDKQSGKTILDFLKSDGFANRNFMQLIHDDSLTFKEDIQKAQVSGQGDSLHEHIANLAGSPAIKKGILQTVKVVDELVKVMGRHKPENIVIEMARENQTTQKGQKNSRERMKRIEEGIKELGSQILKEHPVENTQLQNEKLYLYYLQNGRDMYVDQELDINRLSDYDVDHIVPQSFLKDDSIDNKVLTRSDKARGKSDNVPSEEVVKKMKNYWRQLLNAKLITQRKFDNLTKAERGGLSELDKAGFIKRQLVETRQITKHVAQILDSRMNTKYDENDKLIREVKVITLKSKLVSDFRKDFQFYKVREINNYHHAHDAYLNAVVGTALIKKYPKLESEFVYGDYKVYDVRKMIAKSEQEIGKATAKYFFYSNIMNFFKTEITLANGEIRKRPLIETNGETGEIVWDKGRDFATVRKVLSMPQVNIVKKTEVQTGGFSKESILPKRNSDKLIARKKDWDPKKYGGFDSPTVAYSVLVVAKVEKGKSKKLKSVKELLGITIMERSSFEKNPIDFLEAKGYKEVKKDLIIKLPKYSLFELENGRKRMLASAGELQKGNELALPSKYVNFLYLASHYEKLKGSPEDNEQKQLFVEQHKHYLDEIIEQISEFSKRVILADANLDKVLSAYNKHRDKPIREQAENIIHLFTLTNLGAPAAFKYFDTTIDRKRYTSTKEVLDATLIHQSITGLYETRIDLSQLGGDGGGSSPAPGGGGGTAPLEEEYRLFLEAPIQNVTLLEQWKREIPKVWAEINPPGLASTQAPIHVQLLSTALPVRVRQYPITLEAKRSLRETIRKFRAAGILRPVHSPWNTPLLPVRKSGTSEYRMVQDLREVNKRVETIHPTVPNPYTLLSLLPPDRIWYSVLDLKDAFFCIPLAPESQLIFAFEWADAEEGESGQLTWTRLPQGFKNSPTLFNEALNRDLQGFRLDHPSVSLLQYVDDLLIAADTQAACLSATRDLLMTLAELGYRVSGKKAQLCQEEVTYLGFKIHKGSRSLSNSRTQAILQIPVPKTKRQVREFLGTIGYCRLWIPGFAELAQPLYAATRPGNDPLVWGEKEEEAFQSLKLALTQPPALALPSLDKPFQLFVEETSGAAKGVLTQALGPWKRPVAYLSKRLDPVAAGWPRCLRAIAAAALLTREASKLTFGQDIEITSSHNLESLLRSPPDKWLTNARITQYQVLLLDPPRVRFKQTAALNPATLLPETDDTLPIHHCLDTLDSLTSTRPDLTDQPLAQAEATLFTDGSSYIRDGKRYAGAAVVTLDSVIWAEPLPIGTSAQKAELIALTKALEWSKDKSVNIYTDSRYAFATLHVHGMIYRERGWLTAGGKAIKNAPEILALLTAVWLPKRVAVMHCKGHQKDDAPTSTGNRRADEVAREVAIRPLSTQATISAGKRTADGSEFEKRTADGSEFESPKKKAKVE

SEQ ID NO: 7403 - protein, 2096 aa, synthetic construct
MPAAKRVKLDGGDKKYSIGLDIGTNSVGWAVITDEYKVPSKKFKVLGNTDRHSIKKNLIGALLFDSGETAEATRLKRTARRRYTRRKNRICYLQEIFSNEMAKVDDSFFHRLEESFLVEEDKKHERHPIFGNIVDEVAYHEKYPTIYHLRKKLVDSTDKADLRLIYLALAHMIKFRGHFLIEGDLNPDNSDVDKLFIQLVQTYNQLFEENPINASGVDAKAILSARLSKSRRLENLIAQLPGEKKNGLFGNLIALSLGLTPNFKSNFDLAEDAKLQLSKDTYDDDLDNLLAQIGDQYADLFLAAKNLSDAILLSDILRVNTEITKAPLSASMIKRYDEHHQDLTLLKALVRQQLPEKYKEIFFDQSKNGYAGYIDGGASQEEFYKFIKPILEKMDGTEELLVKLNREDLLRKQRTFDNGSIPHQIHLGELHAILRRQEDFYPFLKDNREKIEKILTFRIPYYVGPLARGNSRFAWMTRKSEETITPWNFEEVVDKGASAQSFIERMTNFDKNLPNEKVLPKHSLLYEYFTVYNELTKVKYVTEGMRKPAFLSGEQKKAIVDLLFKTNRKVTVKQLKEDYFKKIECFDSVEISGVEDRFNASLGTYHDLLKIIKDKDFLDNEENEDILEDIVLTLTLFEDREMIEERLKTYAHLFDDKVMKQLKRRRYTGWGRLSRKLINGIRDKQSGKTILDFLKSDGFANRNFMQLIHDDSLTFKEDIQKAQVSGQGDSLHEHIANLAGSPAIKKGILQTVKVVDELVKVMGRHKPENIVIEMARENQTTQKGQKNSRERMKRIEEGIKELGSQILKEHPVENTQLQNEKLYLYYLQNGRDMYVDQELDINRLSDYDVDHIVPQSFLKDDSIDNKVLTRSDKARGKSDNVPSEEVVKKMKNYWRQLLNAKLITQRKFDNLTKAERGGLSELDKAGFIKRQLVETRQITKHVAQILDSRMNTKYDENDKLIREVKVITLKSKLVSDFRKDFQFYKVREINNYHHAHDAYLNAVVGTALIKKYPKLESEFVYGDYKVYDVRKMIAKSEQEIGKATAKYFFYSNIMNFFKTEITLANGEIRKRPLIETNGETGEIVWDKGRDFATVRKVLSMPQVNIVKKTEVQTGGFSKESILPKRNSDKLIARKKDWDPKKYGGFDSPTVAYSVLVVAKVEKGKSKKLKSVKELLGITIMERSSFEKNPIDFLEAKGYKEVKKDLIIKLPKYSLFELENGRKRMLASAGELQKGNELALPSKYVNFLYLASHYEKLKGSPEDNEQKQLFVEQHKHYLDEIIEQISEFSKRVILADANLDKVLSAYNKHRDKPIREQAENIIHLFTLTNLGAPAAFKYFDTTIDRKRYTSTKEVLDATLIHQSITGLYETRIDLSQLGGDGGGSSPAPGGGGGTAPLEEEYRLFLEAPIQNVTLLEQWKREIPKVWAEINPPGLASTQAPIHVQLLSTALPVRVRQYPITLEAKRSLRETIRKFRAAGILRPVHSPWNTPLLPVRKSGTSEYRMVQDLREVNKRVETIHPTVPNPYTLLSLLPPDRIWYSVLDLKDAFFCIPLAPESQLIFAFEWADAEEGESGQLTWTRLPQGFKNSPTLFNEALNRDLQGFRLDHPSVSLLQYVDDLLIAADTQAACLSATRDLLMTLAELGYRVSGKKAQLCQEEVTYLGFKIHKGSRSLSNSRTQAILQIPVPKTKRQVREFLGKIGYCRLFIPGFAELAQPLYAATRPGNDPLVWGEKEEEAFQSLKLALTQPPALALPSLDKPFQLFVEETSGAAKGVLTQALGPWKRPVAYLSKRLDPVAAGWPRCLRAIAAAALLTREASKLTFGQDIEITSSHNLESLLRSPPDKWLTNARITQYQVLLLDPPRVRFKQTAALNPATLLPETDDTLPIHHCLDTLDSLTSTRPDLTDQPLAQAEATLFTDGSSYIRDGKRYAGAAVVTLDSVIWAEPLPIGTSAQKAELIALTKALEWSKDKSVNIYTDSRYAFATLHVHGMIYRERGWLTAGGKAIKNAPEILALLTAVWLPKRVAVMHCKGHQKDDAPTSTGNRRADEVAREVAIRPLSTQATISAGKRTADGSEFEKRTADGSEFESPKKKAKVE

SEQ ID NO: 7404 - protein, 2092 aa, synthetic construct
MPAAKRVKLDGGDKKYSIGLDIGTNSVGWAVITDEYKVPSKKFKVLGNTDRHSIKKNLIGALLFDSGETAEATRLKRTARRRYTRRKNRICYLQEIFSNEMAKVDDSFFHRLEESFLVEEDKKHERHPIFGNIVDEVAYHEKYPTIYHLRKKLVDSTDKADLRLIYLALAHMIKFRGHFLIEGDLNPDNSDVDKLFIQLVQTYNQLFEENPINASGVDAKAILSARLSKSRRLENLIAQLPGEKKNGLFGNLIALSLGLTPNFKSNFDLAEDAKLQLSKDTYDDDLDNLLAQIGDQYADLFLAAKNLSDAILLSDILRVNTEITKAPLSASMIKRYDEHHQDLTLLKALVRQQLPEKYKEIFFDQSKNGYAGYIDGGASQEEFYKFIKPILEKMDGTEELLVKLNREDLLRKQRTFDNGSIPHQIHLGELHAILRRQEDFYPFLKDNREKIEKILTFRIPYYVGPLARGNSRFAWMTRKSEETITPWNFEEVVDKGASAQSFIERMTNFDKNLPNEKVLPKHSLLYEYFTVYNELTKVKYVTEGMRKPAFLSGEQKKAIVDLLFKTNRKVTVKQLKEDYFKKIECFDSVEISGVEDRFNASLGTYHDLLKIIKDKDFLDNEENEDILEDIVLTLTLFEDREMIEERLKTYAHLFDDKVMKQLKRRRYTGWGRLSRKLINGIRDKQSGKTILDFLKSDGFANRNFMQLIHDDSLTFKEDIQKAQVSGQGDSLHEHIANLAGSPAIKKGILQTVKVVDELVKVMGRHKPENIVIEMARENQTTQKGQKNSRERMKRIEEGIKELGSQILKEHPVENTQLQNEKLYLYYLQNGRDMYVDQELDINRLSDYDVDHIVPQSFLKDDSIDNKVLTRSDKARGKSDNVPSEEVVKKMKNYWRQLLNAKLITQRKFDNLTKAERGGLSELDKAGFIKRQLVETRQITKHVAQILDSRMNTKYDENDKLIREVKVITLKSKLVSDFRKDFQFYKVREINNYHHAHDAYLNAVVGTALIKKYPKLESEFVYGDYKVYDVRKMIAKSEQEIGKATAKYFFYSNIMNFFKTEITLANGEIRKRPLIETNGETGEIVWDKGRDFATVRKVLSMPQVNIVKKTEVQTGGFSKESILPKRNSDKLIARKKDWDPKKYGGFDSPTVAYSVLVVAKVEKGKSKKLKSVKELLGITIMERSSFEKNPIDFLEAKGYKEVKKDLIIKLPKYSLFELENGRKRMLASAGELQKGNELALPSKYVNFLYLASHYEKLKGSPEDNEQKQLFVEQHKHYLDEIIEQISEFSKRVILADANLDKVLSAYNKHRDKPIREQAENIIHLFTLTNLGAPAAFKYFDTTIDRKRYTSTKEVLDATLIHQSITGLYETRIDLSQLGGDGGGSSPAPGGGGGVLNLEEEYRLHEKPVPSSIDPSWLQLFPTVWAERAGMGLANQVPPVVVELRSGASPVAVRQYPMSKEAREGIRPHIQKFLDLGVLVPCRSPWNTPLLPVKKPGTNDYRPVQDLREINKRVQDIHPTVPNPYNLLSSLPPSYTWYSVLDLKDAFFCLRLHPNSQPLFAFEWKDPEKGNTGQLTWTRLPQGFKNSPTLFNEALHRDLAPFRALNPQVVLLQYVDDLLVAAPTYEDCKKGTQKLLQELSKLGYRVSAKKAQLCQREVTYLGYLLKEGKRWLTPARKATVMKIPVPTTPRQVREFLGKAGFCRLFIPGFASLAAPLYPLTKPSIPFIWTEEHQQAFDHIKKALLSAPALALPDLTKPFTLYIDERAGVARGVLTQTLGPWRRPVAYLSKKLDPVASGWPTCLKAVAAVALLLKDADKLTLGQNVTVIASHSLESIVRQPPDRWMTNARMTHYQSLLLNERVSFAPPAVLNPATLLPVESEATPVHRCSEILAEETGTRRDLEDQPLPGVPTWYTDGSSFITEGKRRAGAPIVDGKRTVWASSLPEGTSAQKAELVALTQALRLAEGKNINIYTDSRYAFATAHIHGAIYKQRGWLTSAGKDIKNKEEILALLEAIHLPRRVAIIHCPGHQRGSNPVATGNRRADEAAKQAALSTRVLAGTTKPAGKRTADGSEFEKRTADGSEFESPKKKAKVE

SEQ ID NO: 7405 - protein, 2125 aa, synthetic construct
MPAAKRVKLDGGDKKYSIGLDIGTNSVGWAVITDEYKVPSKKFKVLGNTDRHSIKKNLIGALLFDSGETAEATRLKRTARRRYTRRKNRICYLQEIFSNEMAKVDDSFFHRLEESFLVEEDKKHERHPIFGNIVDEVAYHEKYPTIYHLRKKLVDSTDKADLRLIYLALAHMIKFRGHFLIEGDLNPDNSDVDKLFIQLVQTYNQLFEENPINASGVDAKAILSARLSKSRRLENLIAQLPGEKKNGLFGNLIALSLGLTPNFKSNFDLAEDAKLQLSKDTYDDDLDNLLAQIGDQYADLFLAAKNLSDAILLSDILRVNTEITKAPLSASMIKRYDEHHQDLTLLKALVRQQLPEKYKEIFFDQSKNGYAGYIDGGASQEEFYKFIKPILEKMDGTEELLVKLNREDLLRKQRTFDNGSIPHQIHLGELHAILRRQEDFYPFLKDNREKIEKILTFRIPYYVGPLARGNSRFAWMTRKSEETITPWNFEEVVDKGASAQSFIERMTNFDKNLPNEKVLPKHSLLYEYFTVYNELTKVKYVTEGMRKPAFLSGEQKKAIVDLLFKTNRKVTVKQLKEDYFKKIECFDSVEISGVEDRFNASLGTYHDLLKIIKDKDFLDNEENEDILEDIVLTLTLFEDREMIEERLKTYAHLFDDKVMKQLKRRRYTGWGRLSRKLINGIRDKQSGKTILDFLKSDGFANRNFMQLIHDDSLTFKEDIQKAQVSGQGDSLHEHIANLAGSPAIKKGILQTVKVVDELVKVMGRHKPENIVIEMARENQTTQKGQKNSRERMKRIEEGIKELGSQILKEHPVENTQLQNEKLYLYYLQNGRDMYVDQELDINRLSDYDVDHIVPQSFLKDDSIDNKVLTRSDKARGKSDNVPSEEVVKKMKNYWRQLLNAKLITQRKFDNLTKAERGGLSELDKAGFIKRQLVETRQITKHVAQILDSRMNTKYDENDKLIREVKVITLKSKLVSDFRKDFQFYKVREINNYHHAHDAYLNAVVGTALIKKYPKLESEFVYGDYKVYDVRKMIAKSEQEIGKATAKYFFYSNIMNFFKTEITLANGEIRKRPLIETNGETGEIVWDKGRDFATVRKVLSMPQVNIVKKTEVQTGGFSKESILPKRNSDKLIARKKDWDPKKYGGFDSPTVAYSVLVVAKVEKGKSKKLKSVKELLGITIMERSSFEKNPIDFLEAKGYKEVKKDLIIKLPKYSLFELENGRKRMLASAGELQKGNELALPSKYVNFLYLASHYEKLKGSPEDNEQKQLFVEQHKHYLDEIIEQISEFSKRVILADANLDKVLSAYNKHRDKPIREQAENIIHLFTLTNLGAPAAFKYFDTTIDRKRYTSTKEVLDATLIHQSITGLYETRIDLSQLGGDGGGSSPAPGGGGGLLGRDLLTKLKAQIQFSTEGPQVTWEDRPAMCLVLNLEEEYRLHEKPVPPSIDPSWLQLFPMVWAEKAGMGLANQVPPVVVELKSDASPVAVRQYPMSKEAREGIRPHIQRFLDLGILVPCQSPWNTPLLPVKKPGTNDYRPVQDLREVNKRVQDIHPTVPNPYNLLSSLPPSHTWYSVLDLKDAFFCLKLHPNSQPLFAFEWRDPEKGNTGQLTWTRLPQGFKNSPTLFDEALHRDLASFRALNPQVVMLQYVDDLLVAAPTYRDCKEGTRRLLQELSKLGYRVSAKKAQLCREEVTYLGYLLKGGKRWLTPARKATVMKIPTPTTPRQVREFLGTAGFCRLWIPGFASLAAPLYPLTREKVPFTWTEAHQEAFGRIKEALLSAPALALPDLTKPFALYVDEKEGVARGVLTQTLGPWRRPVAYLSKKLDPVASGWPTCLKAIAAVALLLKDADKLTLGQNVLVIAPHNLESIVRQPPDRWMTNARMTHYQSLLLNERVSFAPPAILNPATLLPVESDDTPIHICSEILAEETGTRPDLRDQPLPGVPAWYTDGSSFIMDGRRQAGAAIVDNKRTVWASNLPEGTSAQKAELIALTQALRLAEGKSINIYTDSRYAFATAHVHGAIYKQRGLLTSAGKDIKNKEEILALLEAIHLPKRVAIIHCPGHQRGTDPVATGNRKADEAAKQAAQSTRILTETTKNAGKRTADGSEFEKRTADGSEFESPKKKAKVE

SEQ ID NO: 7406 - protein, 2216 aa, synthetic construct
MPAAKRVKLDGGDKKYSIGLDIGTNSVGWAVITDEYKVPSKKFKVLGNTDRHSIKKNLIGALLFDSGETAEATRLKRTARRRYTRRKNRICYLQEIFSNEMAKVDDSFFHRLEESFLVEEDKKHERHPIFGNIVDEVAYHEKYPTIYHLRKKLVDSTDKADLRLIYLALAHMIKFRGHFLIEGDLNPDNSDVDKLFIQLVQTYNQLFEENPINASGVDAKAILSARLSKSRRLENLIAQLPGEKKNGLFGNLIALSLGLTPNFKSNFDLAEDAKLQLSKDTYDDDLDNLLAQIGDQYADLFLAAKNLSDAILLSDILRVNTEITKAPLSASMIKRYDEHHQDLTLLKALVRQQLPEKYKEIFFDQSKNGYAGYIDGGASQEEFYKFIKPILEKMDGTEELLVKLNREDLLRKQRTFDNGSIPHQIHLGELHAILRRQEDFYPFLKDNREKIEKILTFRIPYYVGPLARGNSRFAWMTRKSEETITPWNFEEVVDKGASAQSFIERMTNFDKNLPNEKVLPKHSLLYEYFTVYNELTKVKYVTEGMRKPAFLSGEQKKAIVDLLFKTNRKVTVKQLKEDYFKKIECFDSVEISGVEDRFNASLGTYHDLLKIIKDKDFLDNEENEDILEDIVLTLTLFEDREMIEERLKTYAHLFDDKVMKQLKRRRYTGWGRLSRKLINGIRDKQSGKTILDFLKSDGFANRNFMQLIHDDSLTFKEDIQKAQVSGQGDSLHEHIANLAGSPAIKKGILQTVKVVDELVKVMGRHKPENIVIEMARENQTTQKGQKNSRERMKRIEEGIKELGSQILKEHPVENTQLQNEKLYLYYLQNGRDMYVDQELDINRLSDYDVDHIVPQSFLKDDSIDNKVLTRSDKARGKSDNVPSEEVVKKMKNYWRQLLNAKLITQRKFDNLTKAERGGLSELDKAGFIKRQLVETRQITKHVAQILDSRMNTKYDENDKLIREVKVITLKSKLVSDFRKDFQFYKVREINNYHHAHDAYLNAVVGTALIKKYPKLESEFVYGDYKVYDVRKMIAKSEQEIGKATAKYFFYSNIMNFFKTEITLANGEIRKRPLIETNGETGEIVWDKGRDFATVRKVLSMPQVNIVKKTEVQTGGFSKESILPKRNSDKLIARKKDWDPKKYGGFDSPTVAYSVLVVAKVEKGKSKKLKSVKELLGITIMERSSFEKNPIDFLEAKGYKEVKKDLIIKLPKYSLFELENGRKRMLASAGELQKGNELALPSKYVNFLYLASHYEKLKGSPEDNEQKQLFVEQHKHYLDEIIEQISEFSKRVILADANLDKVLSAYNKHRDKPIREQAENIIHLFTLTNLGAPAAFKYFDTTIDRKRYTSTKEVLDATLIHQSITGLYETRIDLSQLGGDGGGSSPAPGGGGGTLGDQGSRGSDPLPEPRVTLTVEGIPTEFLVNTGAEHSVLTKPMGKMGSKRTVVAGATGSKVYPWTTKRLLKIGQKQVTHSFLVIPECPAPLLGRDLLTKLKAQIQFSTEGPQVTWEDRPAMCLVLNLEEEYRLHEKPVPPSIDPSWLQLFPMVWAEKAGMGLANQVPPVVVELKSDASPVAVRQYPMSKEAREGIRPHIQRFLDLGILVPCQSPWNTPLLPVKKPGTNDYRPVQDLREVNKRVQDIHPTVPNPYNLLSSLPPSHTWYSVLDLKDAFFCLKLHPNSQPLFAFEWRDPEKGNTGQLTWTRLPQGFKNSPTLFNEALHRDLASFRALNPQVVMLQYVDDLLVAAPTYRDCKEGTRRLLQELSKLGYRVSAKKAQLCREEVTYLGYLLKGGKRWLTPARKATVMKIPTPTTPRQVREFLGTAGFCRLWIPGFASLAAPLYPLTRPKVPFTWTEAHQEAFGRIKEALLSAPALALPDLTKPFALYVDEKEGVARGVLTQTLGPWRRPVAYLSKKLDPVASGWPTCLKAIAAVALLLKDADKLTLGQNVLVIAPHNLESIVRQPPDRWMTNARMTHYQSLLLNERVSFAPPAILNPATLLPVESDDTPIHICSEILAEETGTRPDLRDQPLPGVPAWYTDGSSFIMDGRRQAGAAIVDNKRTVWASNLPEGTSAQKAELIALTQALRLAEGKSINIYTDSRYAFATAHVHGAIYKQRGWLTSAGKDIKNKEEILALLEAIHLPKRVAIIHCPGHQRGTDPVATGNRKADEAAKQAAQSTRILTETTKNAGKRTADGSEFEKRTADGSEFESPKKKAKVE

SEQ ID NO: 7407 - protein, 2216 aa, synthetic construct
MPAAKRVKLDGGDKKYSIGLDIGTNSVGWAVITDEYKVPSKKFKVLGNTDRHSIKKNLIGALLFDSGETAEATRLKRTARRRYTRRKNRICYLQEIFSNEMAKVDDSFFHRLEESFLVEEDKKHERHPIFGNIVDEVAYHEKYPTIYHLRKKLVDSTDKADLRLIYLALAHMIKFRGHFLIEGDLNPDNSDVDKLFIQLVQTYNQLFEENPINASGVDAKAILSARLSKSRRLENLIAQLPGEKKNGLFGNLIALSLGLTPNFKSNFDLAEDAKLQLSKDTYDDDLDNLLAQIGDQYADLFLAAKNLSDAILLSDILRVNTEITKAPLSASMIKRYDEHHQDLTLLKALVRQQLPEKYKEIFFDQSKNGYAGYIDGGASQEEFYKFIKPILEKMDGTEELLVKLNREDLLRKQRTFDNGSIPHQIHLGELHAILRRQEDFYPFLKDNREKIEKILTFRIPYYVGPLARGNSRFAWMTRKSEETITPWNFEEVVDKGASAQSFIERMTNFDKNLPNEKVLPKHSLLYEYFTVYNELTKVKYVTEGMRKPAFLSGEQKKAIVDLLFKTNRKVTVKQLKEDYFKKIECFDSVEISGVEDRFNASLGTYHDLLKIIKDKDFLDNEENEDILEDIVLTLTLFEDREMIEERLKTYAHLFDDKVMKQLKRRRYTGWGRLSRKLINGIRDKQSGKTILDFLKSDGFANRNFMQLIHDDSLTFKEDIQKAQVSGQGDSLHEHIANLAGSPAIKKGILQTVKVVDELVKVMGRHKPENIVIEMARENQTTQKGQKNSRERMKRIEEGIKELGSQILKEHPVENTQLQNEKLYLYYLQNGRDMYVDQELDINRLSDYDVDHIVPQSFLKDDSIDNKVLTRSDKARGKSDNVPSEEVVKKMKNYWRQLLNAKLITQRKFDNLTKAERGGLSELDKAGFIKRQLVETRQITKHVAQILDSRMNTKYDENDKLIREVKVITLKSKLVSDFRKDFQFYKVREINNYHHAHDAYLNAVVGTALIKKYPKLESEFVYGDYKVYDVRKMIAKSEQEIGKATAKYFFYSNIMNFFKTEITLANGEIRKRPLIETNGETGEIVWDKGRDFATVRKVLSMPQVNIVKKTEVQTGGFSKESILPKRNSDKLIARKKDWDPKKYGGFDSPTVAYSVLVVAKVEKGKSKKLKSVKELLGITIMERSSFEKNPIDFLEAKGYKEVKKDLIIKLPKYSLFELENGRKRMLASAGELQKGNELALPSKYVNFLYLASHYEKLKGSPEDNEQKQLFVEQHKHYLDEIIEQISEFSKRVILADANLDKVLSAYNKHRDKPIREQAENIIHLFTLTNLGAPAAFKYFDTTIDRKRYTSTKEVLDATLIHQSITGLYETRIDLSQLGGDGGGSSPAPGGGGGTLGDQGSRGSDPLPEPRVTLTVEGIPTEFLVNTGAEHSVLTKPMGKMGSKRTVVAGATGSKVYPWTTKRLLKIGQKQVTHSFLVIPECPAPLLGRDLLTKLKAQIQFSTEGPQVTWEDRPAMCLVLNLEEEYRLHEKPVPPSIDPSWLQLFPMVWAEKAGMGLANQVPPVVVELKSDASPVAVRQYPMSKEAREGIRPHIQRFLDLGILVPCQSPWNTPLLPVKKPGTNDYRPVQDLREVNKRVQDIHPTVPNPYNLLSSLPPSHTWYSVLDLKDAFFCLKLHPNSQPLFAFEWRDPEKGNTGQLTWTRLPQGFKNSPTLFNEALHRDLASFRALNPQVVMLQYVDDLLVAAPTYRDCKEGTRRLLQELSKLGYRVSAKKAQLCREEVTYLGYLLKGGKRWLTPARKATVMKIPTPTTPRQVREFLGKAGFCRLFIPGFASLAAPLYPLTRPKVPFTWTEAHQEAFGRIKEALLSAPALALPDLTKPFALYVDEKEGVARGVLTQTLGPWRRPVAYLSKKLDPVASGWPTCLKAIAAVALLLKDADKLTLGQNVLVIAPHNLESIVRQPPDRWMTNARMTHYQSLLLNERVSFAPPAILNPATLLPVESDDTPIHICSEILAEETGTRPDLRDQPLPGVPAWYTDGSSFIMDGRRQAGAAIVDNKRTVWASNLPEGTSAQKAELIALTQALRLAEGKSINIYTDSRYAFATAHVHGAIYKQRGWLTSAGKDIKNKEEILALLEAIHLPKRVAIIHCPGHQRGTDPVATGNRKADEAAKQAAQSTRILTETTKNAGKRTADGSEFEKRTADGSEFESPKKKAKVE

SEQ ID NO: 7408 - protein, 2094 aa, synthetic construct
MPAAKRVKLDGGDKKYSIGLDIGTNSVGWAVITDEYKVPSKKFKVLGNTDRHSIKKNLIGALLFDSGETAEATRLKRTARRRYTRRKNRICYLQEIFSNEMAKVDDSFFHRLEESFLVEEDKKHERHPIFGNIVDEVAYHEKYPTIYHLRKKLVDSTDKADLRLIYLALAHMIKFRGHFLIEGDLNPDNSDVDKLFIQLVQTYNQLFEENPINASGVDAKAILSARLSKSRRLENLIAQLPGEKKNGLFGNLIALSLGLTPNFKSNFDLAEDAKLQLSKDTYDDDLDNLLAQIGDQYADLFLAAKNLSDAILLSDILRVNTEITKAPLSASMIKRYDEHHQDLTLLKALVRQQLPEKYKEIFFDQSKNGYAGYIDGGASQEEFYKFIKPILEKMDGTEELLVKLNREDLLRKQRTFDNGSIPHQIHLGELHAILRRQEDFYPFLKDNREKIEKILTFRIPYYVGPLARGNSRFAWMTRKSEETITPWNFEEVVDKGASAQSFIERMTNFDKNLPNEKVLPKHSLLYEYFTVYNELTKVKYVTEGMRKPAFLSGEQKKAIVDLLFKTNRKVTVKQLKEDYFKKIECFDSVEISGVEDRFNASLGTYHDLLKIIKDKDFLDNEENEDILEDIVLTLTLFEDREMIEERLKTYAHLFDDKVMKQLKRRRYTGWGRLSRKLINGIRDKQSGKTILDFLKSDGFANRNFMQLIHDDSLTFKEDIQKAQVSGQGDSLHEHIANLAGSPAIKKGILQTVKVVDELVKVMGRHKPENIVIEMARENQTTQKGQKNSRERMKRIEEGIKELGSQILKEHPVENTQLQNEKLYLYYLQNGRDMYVDQELDINRLSDYDVDHIVPQSFLKDDSIDNKVLTRSDKARGKSDNVPSEEVVKKMKNYWRQLLNAKLITQRKFDNLTKAERGGLSELDKAGFIKRQLVETRQITKHVAQILDSRMNTKYDENDKLIREVKVITLKSKLVSDFRKDFQFYKVREINNYHHAHDAYLNAVVGTALIKKYPKLESEFVYGDYKVYDVRKMIAKSEQEIGKATAKYFFYSNIMNFFKTEITLANGEIRKRPLIETNGETGEIVWDKGRDFATVRKVLSMPQVNIVKKTEVQTGGFSKESILPKRNSDKLIARKKDWDPKKYGGFDSPTVAYSVLVVAKVEKGKSKKLKSVKELLGITIMERSSFEKNPIDFLEAKGYKEVKKDLIIKLPKYSLFELENGRKRMLASAGELQKGNELALPSKYVNFLYLASHYEKLKGSPEDNEQKQLFVEQHKHYLDEIIEQISEFSKRVILADANLDKVLSAYNKHRDKPIREQAENIIHLFTLTNLGAPAAFKYFDTTIDRKRYTSTKEVLDATLIHQSITGLYETRIDLSQLGGDGGGSSPAPGGGGGTLNLEDEYRLYETSAEPEVSPGSTWLSDFPQAWAETGGMGLAVRQAPLIIPLKATSTPVSIKQYPMSQEAKLGIKPHIQRLLDQGILVPCQSPWNTPLLPVKKPGTNDYRPVQDLREVNKRVEDIHPTVPNPYNLLSGLPPSHRWYTVLDLKDAFFCLRLHPTSQPLFAFEWRDPGMGISGQLTWTRLPQGFKNSPTLFNEALHRDLADFRIQHPDLILLQYVDDILLAATSELDCQQGTRALLLTLGNLGYRASAKKAQLCQKQVKYLGYLLKEGQRWLTEARKETVMGQPTPKTPRQLREFLGTAGFCRLWIPGFAEMAAPLYPLTKPGTLFNWGPDQQKAYQEIKQALLTAPALGLPDLTKPFELFVDEKQGYAKGVLTQKLGPWRRPVAYLSKKLDPVAAGWPPCLRMVAAIAVLRKDAGKLTMGQPLVILAPHAVEALVKQPPDRWLSNARMTHYQAMLLDTDRVQFGPVVALNPATLLPLPEEGAPHDCLEILAETHGTRPDLTDQPIPDADHTWYTDGSSFLQEGQRKAGAAVTTETEVIWARALPAGTSAQRAELIALTQALKMAEGKRLNVYTDSRYAFATAHIHGEIYRRRGWLTSEGREIKNKSEILALLKALFLPKRLSIIHCLGHQKGDSAEARGNRLADQAAREAAIKTPPDTSTLLAGKRTADGSEFEKRTADGSEFESPKKKAKVE

SEQ ID NO: 7409 - protein, 2094 aa, synthetic construct
MPAAKRVKLDGGDKKYSIGLDIGTNSVGWAVITDEYKVPSKKFKVLGNTDRHSIKKNLIGALLFDSGETAEATRLKRTARRRYTRRKNRICYLQEIFSNEMAKVDDSFFHRLEESFLVEEDKKHERHPIFGNIVDEVAYHEKYPTIYHLRKKLVDSTDKADLRLIYLALAHMIKFRGHFLIEGDLNPDNSDVDKLFIQLVQTYNQLFEENPINASGVDAKAILSARLSKSRRLENLIAQLPGEKKNGLFGNLIALSLGLTPNFKSNFDLAEDAKLQLSKDTYDDDLDNLLAQIGDQYADLFLAAKNLSDAILLSDILRVNTEITKAPLSASMIKRYDEHHQDLTLLKALVRQQLPEKYKEIFFDQSKNGYAGYIDGGASQEEFYKFIKPILEKMDGTEELLVKLNREDLLRKQRTFDNGSIPHQIHLGELHAILRRQEDFYPFLKDNREKIEKILTFRIPYYVGPLARGNSRFAWMTRKSEETITPWNFEEVVDKGASAQSFIERMTNFDKNLPNEKVLPKHSLLYEYFTVYNELTKVKYVTEGMRKPAFLSGEQKKAIVDLLFKTNRKVTVKQLKEDYFKKIECFDSVEISGVEDRFNASLGTYHDLLKIIKDKDFLDNEENEDILEDIVLTLTLFEDREMIEERLKTYAHLFDDKVMKQLKRRRYTGWGRLSRKLINGIRDKQSGKTILDFLKSDGFANRNFMQLIHDDSLTFKEDIQKAQVSGQGDSLHEHIANLAGSPAIKKGILQTVKVVDELVKVMGRHKPENIVIEMARENQTTQKGQKNSRERMKRIEEGIKELGSQILKEHPVENTQLQNEKLYLYYLQNGRDMYVDQELDINRLSDYDVDHIVPQSFLKDDSIDNKVLTRSDKARGKSDNVPSEEVVKKMKNYWRQLLNAKLITQRKFDNLTKAERGGLSELDKAGFIKRQLVETRQITKHVAQILDSRMNTKYDENDKLIREVKVITLKSKLVSDFRKDFQFYKVREINNYHHAHDAYLNAVVGTALIKKYPKLESEFVYGDYKVYDVRKMIAKSEQEIGKATAKYFFYSNIMNFFKTEITLANGEIRKRPLIETNGETGEIVWDKGRDFATVRKVLSMPQVNIVKKTEVQTGGFSKESILPKRNSDKLIARKKDWDPKKYGGFDSPTVAYSVLVVAKVEKGKSKKLKSVKELLGITIMERSSFEKNPIDFLEAKGYKEVKKDLIIKLPKYSLFELENGRKRMLASAGELQKGNELALPSKYVNFLYLASHYEKLKGSPEDNEQKQLFVEQHKHYLDEIIEQISEFSKRVILADANLDKVLSAYNKHRDKPIREQAENIIHLFTLTNLGAPAAFKYFDTTIDRKRYTSTKEVLDATLIHQSITGLYETRIDLSQLGGDGGGSSPAPGGGGGTLNIEDEYRLHETSKGPDVPLGSTWLSDFPQAWAETGGMGLAFRQAPLIISLKATSTPVSIKQYPMSQEARLGIKPHIQRLLDQGILVPCQSPWNTPLLPVKKPGTNDYRPVQDLREVNKRVEDIHPTVPNPYNLLSGLPPSHQWYTVLDLKDAFFCLRLHPTSQSLFAFEWKDPEMGISGQLTWTRLPQGFKNSPTLFNEALHRDLADFRIQHPDLILLQYVDDLLLAATSELDCQQGTRALLQTLGDLGYRASAKKAQICQKQVKYLGYLLKEGQRWLTEARKETVMGQPTPKTPRQLREFLGTAGLCRLWIPGFAEMAAPLYPLTKPGTLFKWGPDQQKAYQEIKQALLTAPALGLPDLTKPFELFVDEKQGYAKGVLTQKLGPWRRPVAYLSKKLDPVAAGWPPCLRMVAAIAVLTKDVGKLTMGQPLVILAPHAVEALVKQPPDRWLSNARMTHYQALLLDTDRVQFGPIVALNPATLLPLPEEGLQHDCLDILAEAHGTRPDLTDQPLPDADHTWYTDGSSFLQEGQRRAGAAVTTETEVIWAKALPAGTSAQRAELIALTQALKMAAGKKLNVYTDSRYAFATAHIHGEIYRRRGWLTSEGKEIKNKDEILALLKALFLPKRLSIIHCPGHQKGNHAEARGNRMADQAAREVATRETPETSTLLAGKRTADGSEFEKRTADGSEFESPKKKAKVE

SEQ ID NO: 7410 - protein, 2094 aa, synthetic construct
MPAAKRVKLDGGDKKYSIGLDIGTNSVGWAVITDEYKVPSKKFKVLGNTDRHSIKKNLIGALLFDSGETAEATRLKRTARRRYTRRKNRICYLQEIFSNEMAKVDDSFFHRLEESFLVEEDKKHERHPIFGNIVDEVAYHEKYPTIYHLRKKLVDSTDKADLRLIYLALAHMIKFRGHFLIEGDLNPDNSDVDKLFIQLVQTYNQLFEENPINASGVDAKAILSARLSKSRRLENLIAQLPGEKKNGLFGNLIALSLGLTPNFKSNFDLAEDAKLQLSKDTYDDDLDNLLAQIGDQYADLFLAAKNLSDAILLSDILRVNTEITKAPLSASMIKRYDEHHQDLTLLKALVRQQLPEKYKEIFFDQSKNGYAGYIDGGASQEEFYKFIKPILEKMDGTEELLVKLNREDLLRKQRTFDNGSIPHQIHLGELHAILRRQEDFYPFLKDNREKIEKILTFRIPYYVGPLARGNSRFAWMTRKSEETITPWNFEEVVDKGASAQSFIERMTNFDKNLPNEKVLPKHSLLYEYFTVYNELTKVKYVTEGMRKPAFLSGEQKKAIVDLLFKTNRKVTVKQLKEDYFKKIECFDSVEISGVEDRFNASLGTYHDLLKIIKDKDFLDNEENEDILEDIVLTLTLFEDREMIEERLKTYAHLFDDKVMKQLKRRRYTGWGRLSRKLINGIRDKQSGKTILDFLKSDGFANRNFMQLIHDDSLTFKEDIQKAQVSGQGDSLHEHIANLAGSPAIKKGILQTVKVVDELVKVMGRHKPENIVIEMARENQTTQKGQKNSRERMKRIEEGIKELGSQILKEHPVENTQLQNEKLYLYYLQNGRDMYVDQELDINRLSDYDVDHIVPQSFLKDDSIDNKVLTRSDKARGKSDNVPSEEVVKKMKNYWRQLLNAKLITQRKFDNLTKAERGGLSELDKAGFIKRQLVETRQITKHVAQILDSRMNTKYDENDKLIREVKVITLKSKLVSDFRKDFQFYKVREINNYHHAHDAYLNAVVGTALIKKYPKLESEFVYGDYKVYDVRKMIAKSEQEIGKATAKYFFYSNIMNFFKTEITLANGEIRKRPLIETNGETGEIVWDKGRDFATVRKVLSMPQVNIVKKTEVQTGGFSKESILPKRNSDKLIARKKDWDPKKYGGFDSPTVAYSVLVVAKVEKGKSKKLKSVKELLGITIMERSSFEKNPIDFLEAKGYKEVKKDLIIKLPKYSLFELENGRKRMLASAGELQKGNELALPSKYVNFLYLASHYEKLKGSPEDNEQKQLFVEQHKHYLDEIIEQISEFSKRVILADANLDKVLSAYNKHRDKPIREQAENIIHLFTLTNLGAPAAFKYFDTTIDRKRYTSTKEVLDATLIHQSITGLYETRIDLSQLGGDGGGSSPAPGGGGGTLNIEDEYRLHETSKGPDVPLGSTWLSDFPQAWAETGGMGLAVRQAPLIIPLKATSTPVSIKQYPMSQEARLGIKPHIQRLLDQGILVPCQSPWNTPLLPVKKPGTNDYRPVQDLREVNKRVEDIHPTVPNPYNLLSGLPPSHQWYTVLDLKDAFFCLRLHPTSQSLFAFEWRDPEMGISGQLTWTRLPQGFKNSPTLFNEALHRDLADFRIQHPDLILLQYVDDLLLAATSELDCQQGTRALLQTLGDLGYRASAKKAQICQKQVKYLGYLLKEGQRWLTEARKETVMGQPTPKTPRQLREFLGTAGFCRLWIPGFAEMAAPLYPLTKPGTLFEWGPDQQKAYQEIKQALLTAPALGLPDLTKPFELFVDEKQGYAKGVLTQKLGPWRRPVAYLSKKLDPVAAGWPPCLRMVAAIAVLTKDAGKLTMGQPLVILAPHAVEALVKQPPDRWLSNARMTHYQALLLDTDRVQFGPIVALNPATLLPLPEEGLQHDCLDILAEAHGTRPDLTDQPLPDADHTWYTDGSSFLQEGQRKAGAAVTTETEVVWAKALPAGTSAQRAELIALTQALKMAEGKKLNVYTDSRYAFATAHIHGEIYRRRGWLTSEGKEIKNKDEILALLKALFLPKRLSIIHCPGHQKGNRAEARGNRMADQAAREVATRETPETSTLLAGKRTADGSEFEKRTADGSEFESPKKKAKVE

SEQ ID NO: 7411 - protein, 2094 aa, synthetic construct
MPAAKRVKLDGGDKKYSIGLDIGTNSVGWAVITDEYKVPSKKFKVLGNTDRHSIKKNLIGALLFDSGETAEATRLKRTARRRYTRRKNRICYLQEIFSNEMAKVDDSFFHRLEESFLVEEDKKHERHPIFGNIVDEVAYHEKYPTIYHLRKKLVDSTDKADLRLIYLALAHMIKFRGHFLIEGDLNPDNSDVDKLFIQLVQTYNQLFEENPINASGVDAKAILSARLSKSRRLENLIAQLPGEKKNGLFGNLIALSLGLTPNFKSNFDLAEDAKLQLSKDTYDDDLDNLLAQIGDQYADLFLAAKNLSDAILLSDILRVNTEITKAPLSASMIKRYDEHHQDLTLLKALVRQQLPEKYKEIFFDQSKNGYAGYIDGGASQEEFYKFIKPILEKMDGTEELLVKLNREDLLRKQRTFDNGSIPHQIHLGELHAILRRQEDFYPFLKDNREKIEKILTFRIPYYVGPLARGNSRFAWMTRKSEETITPWNFEEVVDKGASAQSFIERMTNFDKNLPNEKVLPKHSLLYEYFTVYNELTKVKYVTEGMRKPAFLSGEQKKAIVDLLFKTNRKVTVKQLKEDYFKKIECFDSVEISGVEDRFNASLGTYHDLLKIIKDKDFLDNEENEDILEDIVLTLTLFEDREMIEERLKTYAHLFDDKVMKQLKRRRYTGWGRLSRKLINGIRDKQSGKTILDFLKSDGFANRNFMQLIHDDSLTFKEDIQKAQVSGQGDSLHEHIANLAGSPAIKKGILQTVKVVDELVKVMGRHKPENIVIEMARENQTTQKGQKNSRERMKRIEEGIKELGSQILKEHPVENTQLQNEKLYLYYLQNGRDMYVDQELDINRLSDYDVDHIVPQSFLKDDSIDNKVLTRSDKARGKSDNVPSEEVVKKMKNYWRQLLNAKLITQRKFDNLTKAERGGLSELDKAGFIKRQLVETRQITKHVAQILDSRMNTKYDENDKLIREVKVITLKSKLVSDFRKDFQFYKVREINNYHHAHDAYLNAVVGTALIKKYPKLESEFVYGDYKVYDVRKMIAKSEQEIGKATAKYFFYSNIMNFFKTEITLANGEIRKRPLIETNGETGEIVWDKGRDFATVRKVLSMPQVNIVKKTEVQTGGFSKESILPKRNSDKLIARKKDWDPKKYGGFDSPTVAYSVLVVAKVEKGKSKKLKSVKELLGITIMERSSFEKNPIDFLEAKGYKEVKKDLIIKLPKYSLFELENGRKRMLASAGELQKGNELALPSKYVNFLYLASHYEKLKGSPEDNEQKQLFVEQHKHYLDEIIEQISEFSKRVILADANLDKVLSAYNKHRDKPIREQAENIIHLFTLTNLGAPAAFKYFDTTIDRKRYTSTKEVLDATLIHQSITGLYETRIDLSQLGGDGGGSSPAPGGGGGTLNIEDEHRLHETSKEPDVSLGSTWLSDFPQAWAETGGMGLAVRQAPLIIPLKATSTPVSIKQYPMSQEARLGIKPHIQRLLDQGILVPCQSPWNTPLLPVKKPGTNDYRPVQDLREVNKRVEDIHPTVPNPYNLLSGLPPSHQWYTVLDLKDAFFCLRLHPTSQPLFAFEWRDPEMGISGQLTWTRLPQGFKNSPTLFDEALHRDLADFRIQHPDLILLQYVDDLLLAATSELDCQQGTRALLQTLGNLGYRASAKKAQICQKQVKYLGYLLKEGQRWLTEARKETVMGQPTPKTPRQLREFLGTAGFCRLWIPGFAEMAAPLYPLTKTGTLFNWGPDQQKAYQEIKQALLTAPALGLPDLTKPFELFVDEKQGYAKGVLTQKLGPWRRPVAYLSKKLDPVAAGWPPCLRMVAAIAVLTKDAGKLTMGQPLVILAPHAVEALVKQPPDRWLSNARMTHYQALLLDTDRVQFGPVVALNPATLLPLPEEGLQHNCLDILAEAHGTRPDLTDQPLPDADHTWYTDGSSLLQEGQRKAGAAVTTETEVIWAKALPAGTSAQRAELIALTQALKMAEGKKLNVYTDSRYAFATAHIHGEIYRRRGLLTSEGKEIKNKDEILALLKALFLPKRLSIIHCPGHQKGHSAEARGNRMADQAARKAAITETPDTSTLLAGKRTADGSEFEKRTADGSEFESPKKKAKVE

SEQ ID NO: 7412 - protein, 2100 aa, synthetic construct
MPAAKRVKLDGGDKKYSIGLDIGTNSVGWAVITDEYKVPSKKFKVLGNTDRHSIKKNLIGALLFDSGETAEATRLKRTARRRYTRRKNRICYLQEIFSNEMAKVDDSFFHRLEESFLVEEDKKHERHPIFGNIVDEVAYHEKYPTIYHLRKKLVDSTDKADLRLIYLALAHMIKFRGHFLIEGDLNPDNSDVDKLFIQLVQTYNQLFEENPINASGVDAKAILSARLSKSRRLENLIAQLPGEKKNGLFGNLIALSLGLTPNFKSNFDLAEDAKLQLSKDTYDDDLDNLLAQIGDQYADLFLAAKNLSDAILLSDILRVNTEITKAPLSASMIKRYDEHHQDLTLLKALVRQQLPEKYKEIFFDQSKNGYAGYIDGGASQEEFYKFIKPILEKMDGTEELLVKLNREDLLRKQRTFDNGSIPHQIHLGELHAILRRQEDFYPFLKDNREKIEKILTFRIPYYVGPLARGNSRFAWMTRKSEETITPWNFEEVVDKGASAQSFIERMTNFDKNLPNEKVLPKHSLLYEYFTVYNELTKVKYVTEGMRKPAFLSGEQKKAIVDLLFKTNRKVTVKQLKEDYFKKIECFDSVEISGVEDRFNASLGTYHDLLKIIKDKDFLDNEENEDILEDIVLTLTLFEDREMIEERLKTYAHLFDDKVMKQLKRRRYTGWGRLSRKLINGIRDKQSGKTILDFLKSDGFANRNFMQLIHDDSLTFKEDIQKAQVSGQGDSLHEHIANLAGSPAIKKGILQTVKVVDELVKVMGRHKPENIVIEMARENQTTQKGQKNSRERMKRIEEGIKELGSQILKEHPVENTQLQNEKLYLYYLQNGRDMYVDQELDINRLSDYDVDHIVPQSFLKDDSIDNKVLTRSDKARGKSDNVPSEEVVKKMKNYWRQLLNAKLITQRKFDNLTKAERGGLSELDKAGFIKRQLVETRQITKHVAQILDSRMNTKYDENDKLIREVKVITLKSKLVSDFRKDFQFYKVREINNYHHAHDAYLNAVVGTALIKKYPKLESEFVYGDYKVYDVRKMIAKSEQEIGKATAKYFFYSNIMNFFKTEITLANGEIRKRPLIETNGETGEIVWDKGRDFATVRKVLSMPQVNIVKKTEVQTGGFSKESILPKRNSDKLIARKKDWDPKKYGGFDSPTVAYSVLVVAKVEKGKSKKLKSVKELLGITIMERSSFEKNPIDFLEAKGYKEVKKDLIIKLPKYSLFELENGRKRMLASAGELQKGNELALPSKYVNFLYLASHYEKLKGSPEDNEQKQLFVEQHKHYLDEIIEQISEFSKRVILADANLDKVLSAYNKHRDKPIREQAENIIHLFTLTNLGAPAAFKYFDTTIDRKRYTSTKEVLDATLIHQSITGLYETRIDLSQLGGDGGPAPGGGGSSGGTVSLQDEHRLFDIPVTTSLPDVWLQDFPQAWAETGGLGRAKCQAPIIIDLKPTAVPVSIKQYPMSLEAHMGIRQHIIKFLELGVLRPCRSPWNTPLLPVKKPGTQDYRPVQDLREINKRTVDIHPTVPNPYNLLSTLKPDYSWYTVLDLKDAFFCLPLAPQSQELFAFEWKDPERGISGQLTWTRLPQGFKNSPTLFNEALHRDLTDFRTQHPEVTLLQYVDDLLLAAPTKKACTQGTRHLLQELGEKGYRASAKKAQICQTKVTYLGYILSEGKRWLTPGRIETVARIPPPRNPREVREFLGTAGFCRLWIPGFAELAAPLYALTKPSTPFTWQTEHQLAFEALKKALLSAPALGLPDTSKPFTLFLDERQGIAKGVLTQKLGPWKRPVAYLSKKLDPVAAGWPPCLRIMAATAMLVKDSAKLTLGQPLTVITPHTLEAIVRQPPDRWITNARLTHYQALLLDTDRVQFGPPVTLNPATLLPVPENQPSPHDCRQVLAETHGTREDLKDQELPDADHTWYTDGSSYLDSGTRRAGAAVVDGHNTIWAQSLPPGTSAQKAELIALTKALELSKGKKANIYTDSRYAFATAHTHGSIYERRGWLTSEGKEIKNKAEIIALLKALFLPQEVAIIHCPGHQKGQDPVAVGNRQADRVARQAAMAEVLTLATEPDNTSHITAGKRTADGSEFEKRTADGSEFESPKKKAKVE

SEQ ID NO: 7413 - protein, 1999 aa, synthetic construct
MPAAKRVKLDGGDKKYSIGLDIGTNSVGWAVITDEYKVPSKKFKVLGNTDRHSIKKNLIGALLFDSGETAEATRLKRTARRRYTRRKNRICYLQEIFSNEMAKVDDSFFHRLEESFLVEEDKKHERHPIFGNIVDEVAYHEKYPTIYHLRKKLVDSTDKADLRLIYLALAHMIKFRGHFLIEGDLNPDNSDVDKLFIQLVQTYNQLFEENPINASGVDAKAILSARLSKSRRLENLIAQLPGEKKNGLFGNLIALSLGLTPNFKSNFDLAEDAKLQLSKDTYDDDLDNLLAQIGDQYADLFLAAKNLSDAILLSDILRVNTEITKAPLSASMIKRYDEHHQDLTLLKALVRQQLPEKYKEIFFDQSKNGYAGYIDGGASQEEFYKFIKPILEKMDGTEELLVKLNREDLLRKQRTFDNGSIPHQIHLGELHAILRRQEDFYPFLKDNREKIEKILTFRIPYYVGPLARGNSRFAWMTRKSEETITPWNFEEVVDKGASAQSFIERMTNFDKNLPNEKVLPKHSLLYEYFTVYNELTKVKYVTEGMRKPAFLSGEQKKAIVDLLFKTNRKVTVKQLKEDYFKKIECFDSVEISGVEDRFNASLGTYHDLLKIIKDKDFLDNEENEDILEDIVLTLTLFEDREMIEERLKTYAHLFDDKVMKQLKRRRYTGWGRLSRKLINGIRDKQSGKTILDFLKSDGFANRNFMQLIHDDSLTFKEDIQKAQVSGQGDSLHEHIANLAGSPAIKKGILQTVKVVDELVKVMGRHKPENIVIEMARENQTTQKGQKNSRERMKRIEEGIKELGSQILKEHPVENTQLQNEKLYLYYLQNGRDMYVDQELDINRLSDYDVDHIVPQSFLKDDSIDNKVLTRSDKARGKSDNVPSEEVVKKMKNYWRQLLNAKLITQRKFDNLTKAERGGLSELDKAGFIKRQLVETRQITKHVAQILDSRMNTKYDENDKLIREVKVITLKSKLVSDFRKDFQFYKVREINNYHHAHDAYLNAVVGTALIKKYPKLESEFVYGDYKVYDVRKMIAKSEQEIGKATAKYFFYSNIMNFFKTEITLANGEIRKRPLIETNGETGEIVWDKGRDFATVRKVLSMPQVNIVKKTEVQTGGFSKESILPKRNSDKLIARKKDWDPKKYGGFDSPTVAYSVLVVAKVEKGKSKKLKSVKELLGITIMERSSFEKNPIDFLEAKGYKEVKKDLIIKLPKYSLFELENGRKRMLASAGELQKGNELALPSKYVNFLYLASHYEKLKGSPEDNEQKQLFVEQHKHYLDEIIEQISEFSKRVILADANLDKVLSAYNKHRDKPIREQAENIIHLFTLTNLGAPAAFKYFDTTIDRKRYTSTKEVLDATLIHQSITGLYETRIDLSQLGGDGGPAPGGGGSSGGGVLDTPPSHIGLEHLPPPPEVPQFPLNLERLQALQDLVHRSLEAGYISPWDGPGNNPVFPVRKPNGAWRFVHDLRATNALTKPIPALSPGPPDLTAPPTHPPHIICLDLKDAFFQIPVEDRFRFYLSFTLPSPGGLQPHRRFAWRVLPQGFINSPALFQRALQEPLRQVSAAFSQSLLVSYMDDILYASPTEEQRSQCYQALAARLRDLGFQVASEKTSQTPSPVPFLGQMVHEQIVTYQSLPTLQISSPISLHQLQAVLGDLQWVSRGTPTTRRPLQLLYSSLKRHHDPRAIIQLSPEQLQGIAELRQALSHNARSRYNEQEPLLAYVHLTRAGSTLVLFQKGAQFPLAYFQTPLTDNQASPWGLLLLLGCQYLQTQALSSYAKPILKYYHNLPKTSLDNWIQSSEDPRVQELLQLWPQISSQGIQPPGPWKTLITRAEVFLTPQFSPDPIPAALCLFSDGATGRGAYCLWKDHLLDFQAVPAPESAQKGELAGLLAGLAAAPPEPVNIWVDSKYLYSLLRTWVLGAWLQPDPVPSYALLYKSLLRHPAIVVGHVRSHSSASHPIASLNNYVDQLAGKRTADGSEFEKRTADGSEFESPKKKAKVE

SEQ ID NO: 7414 - protein, 2171 aa, synthetic construct
MPAAKRVKLDGGDKKYSIGLDIGTNSVGWAVITDEYKVPSKKFKVLGNTDRHSIKKNLIGALLFDSGETAEATRLKRTARRRYTRRKNRICYLQEIFSNEMAKVDDSFFHRLEESFLVEEDKKHERHPIFGNIVDEVAYHEKYPTIYHLRKKLVDSTDKADLRLIYLALAHMIKFRGHFLIEGDLNPDNSDVDKLFIQLVQTYNQLFEENPINASGVDAKAILSARLSKSRRLENLIAQLPGEKKNGLFGNLIALSLGLTPNFKSNFDLAEDAKLQLSKDTYDDDLDNLLAQIGDQYADLFLAAKNLSDAILLSDILRVNTEITKAPLSASMIKRYDEHHQDLTLLKALVRQQLPEKYKEIFFDQSKNGYAGYIDGGASQEEFYKFIKPILEKMDGTEELLVKLNREDLLRKQRTFDNGSIPHQIHLGELHAILRRQEDFYPFLKDNREKIEKILTFRIPYYVGPLARGNSRFAWMTRKSEETITPWNFEEVVDKGASAQSFIERMTNFDKNLPNEKVLPKHSLLYEYFTVYNELTKVKYVTEGMRKPAFLSGEQKKAIVDLLFKTNRKVTVKQLKEDYFKKIECFDSVEISGVEDRFNASLGTYHDLLKIIKDKDFLDNEENEDILEDIVLTLTLFEDREMIEERLKTYAHLFDDKVMKQLKRRRYTGWGRLSRKLINGIRDKQSGKTILDFLKSDGFANRNFMQLIHDDSLTFKEDIQKAQVSGQGDSLHEHIANLAGSPAIKKGILQTVKVVDELVKVMGRHKPENIVIEMARENQTTQKGQKNSRERMKRIEEGIKELGSQILKEHPVENTQLQNEKLYLYYLQNGRDMYVDQELDINRLSDYDVDHIVPQSFLKDDSIDNKVLTRSDKARGKSDNVPSEEVVKKMKNYWRQLLNAKLITQRKFDNLTKAERGGLSELDKAGFIKRQLVETRQITKHVAQILDSRMNTKYDENDKLIREVKVITLKSKLVSDFRKDFQFYKVREINNYHHAHDAYLNAVVGTALIKKYPKLESEFVYGDYKVYDVRKMIAKSEQEIGKATAKYFFYSNIMNFFKTEITLANGEIRKRPLIETNGETGEIVWDKGRDFATVRKVLSMPQVNIVKKTEVQTGGFSKESILPKRNSDKLIARKKDWDPKKYGGFDSPTVAYSVLVVAKVEKGKSKKLKSVKELLGITIMERSSFEKNPIDFLEAKGYKEVKKDLIIKLPKYSLFELENGRKRMLASAGELQKGNELALPSKYVNFLYLASHYEKLKGSPEDNEQKQLFVEQHKHYLDEIIEQISEFSKRVILADANLDKVLSAYNKHRDKPIREQAENIIHLFTLTNLGAPAAFKYFDTTIDRKRYTSTKEVLDATLIHQSITGLYETRIDLSQLGGDGGPAPGGGGSSGGMDLLKPLTVERKGVKIKGYWNSQADITCVPKDLLQGEEPVRQQNVTTIHGTQEGDVYYVNLKIDGRRINTEVIGTTLDYAIITPGDVPWILKKPLELTIKLDLEEQQGTLLNNSILSKKGKEELKQLFEKYSALWQSWENQVGHRRIRPHKIATGTVKPTPQKQYHINPKAKPDIQIVINDLLKQGVLIQKESTMNTPVYPVPKPNGRWRMVLDYRAVNKVTPLIAVQNQHSYGILGSLFKGRYKTTIDLSNGFWAHPIVPEDYWITAFTWQGKQYCWTVLPQGFLNSPGLFTGDVVDLLQGIPNVEVYVDDVYISHDSEKEHLEYLDILFNRLKEAGYIISLKKSNIANSIVDFLGFQITNEGRGLTDTFKEKLENITAPTTLKQLQSILGLLNFARNFIPDFTELIAPLYALIPKSTKNYVPWQIEHSTTLETLITKLNGAEYLQGRKGDKTLIMKVNASYTTGYIRYYNEGEKKPISYVSIVFSKTELKFTELEKLLTTVHKGLLKALDLSMGQNIHVYSPIVSMQNIQKTPQTAKKALASRWLSWLSYLEDPRIRFFYDPQMPALKDLPAVDTGKDNKKHPSNFQHIFYTDGSAITSPTKEGHLNAGMGIVYFINKDGNLQKQQEWSISLGNHTAQFAEIAAFEFALKKCLPLGGNILVVTDSNYVAKAYNEELDVWASNGFVNNRKKPLKHISKWKSVADLKRLRPDVVVTHEPGHQKLDSSPHAYGNNLADQLATQASFKVHAGKRTADGSEFEKRTADGSEFESPKKKAKVE

SEQ ID NO: 7415 - protein, 2093 aa, synthetic construct
MPAAKRVKLDGGDKKYSIGLDIGTNSVGWAVITDEYKVPSKKFKVLGNTDRHSIKKNLIGALLFDSGETAEATRLKRTARRRYTRRKNRICYLQEIFSNEMAKVDDSFFHRLEESFLVEEDKKHERHPIFGNIVDEVAYHEKYPTIYHLRKKLVDSTDKADLRLIYLALAHMIKFRGHFLIEGDLNPDNSDVDKLFIQLVQTYNQLFEENPINASGVDAKAILSARLSKSRRLENLIAQLPGEKKNGLFGNLIALSLGLTPNFKSNFDLAEDAKLQLSKDTYDDDLDNLLAQIGDQYADLFLAAKNLSDAILLSDILRVNTEITKAPLSASMIKRYDEHHQDLTLLKALVRQQLPEKYKEIFFDQSKNGYAGYIDGGASQEEFYKFIKPILEKMDGTEELLVKLNREDLLRKQRTFDNGSIPHQIHLGELHAILRRQEDFYPFLKDNREKIEKILTFRIPYYVGPLARGNSRFAWMTRKSEETITPWNFEEVVDKGASAQSFIERMTNFDKNLPNEKVLPKHSLLYEYFTVYNELTKVKYVTEGMRKPAFLSGEQKKAIVDLLFKTNRKVTVKQLKEDYFKKIECFDSVEISGVEDRFNASLGTYHDLLKIIKDKDFLDNEENEDILEDIVLTLTLFEDREMIEERLKTYAHLFDDKVMKQLKRRRYTGWGRLSRKLINGIRDKQSGKTILDFLKSDGFANRNFMQLIHDDSLTFKEDIQKAQVSGQGDSLHEHIANLAGSPAIKKGILQTVKVVDELVKVMGRHKPENIVIEMARENQTTQKGQKNSRERMKRIEEGIKELGSQILKEHPVENTQLQNEKLYLYYLQNGRDMYVDQELDINRLSDYDVDHIVPQSFLKDDSIDNKVLTRSDKARGKSDNVPSEEVVKKMKNYWRQLLNAKLITQRKFDNLTKAERGGLSELDKAGFIKRQLVETRQITKHVAQILDSRMNTKYDENDKLIREVKVITLKSKLVSDFRKDFQFYKVREINNYHHAHDAYLNAVVGTALIKKYPKLESEFVYGDYKVYDVRKMIAKSEQEIGKATAKYFFYSNIMNFFKTEITLANGEIRKRPLIETNGETGEIVWDKGRDFATVRKVLSMPQVNIVKKTEVQTGGFSKESILPKRNSDKLIARKKDWDPKKYGGFDSPTVAYSVLVVAKVEKGKSKKLKSVKELLGITIMERSSFEKNPIDFLEAKGYKEVKKDLIIKLPKYSLFELENGRKRMLASAGELQKGNELALPSKYVNFLYLASHYEKLKGSPEDNEQKQLFVEQHKHYLDEIIEQISEFSKRVILADANLDKVLSAYNKHRDKPIREQAENIIHLFTLTNLGAPAAFKYFDTTIDRKRYTSTKEVLDATLIHQSITGLYETRIDLSQLGGDGGPAPGGGGSSGGTLQLEEEYRLFEPESTQKQEMDIWLKNFPQAWAETGGMGTAHCQAPVLIQLKATATPISIRQYPMPHEAYQGIKPHIRRMLDQGILKPCQSPWNTPLLPVKKPGTEDYRPVQDLREVNKRVEDIHPTVPNPYNLLSTLPPSHPWYTVLDLKDAFFCLRLHSESQLLFAFEWRDPEIGLSGQLTWTRLPQGFKNSPTLFNEALHSDLADFRVRYPALVLLQYVDDLLLAAATRTECLEGTKALLETLGNKGYRASAKKAQICLQEVTYLGYSLKDGQRWLTKARKEAILSIPVPKNSRQVREFLGTAGYCRLWIPGFAELAAPLYPLTRPGTLFQWGTEQQLAFEDIKKALLSSPALGLPDITKPFELFIDENSGFAKGVLVQKLGPWKRPVAYLSKKLDTVASGWPPCLRMVAAIAILVKDAGKLTLGQPLTILTSHPVEALVRQPPNKWLSNARMTHYQAMLLDAERVHFGPTVSLNPATLLPLPSGGNHHDCLQILAETHGTRPDLTDQPLPDADLTWYTDGSSFIRNGEREAGAAVTTESEVIWAAPLPPGTSAQRAELIALTQALKMAEGKKLTVYTDSRYAFATTHVHGEIYRRRGWLTSEGKEIKNKNEILALLEALFLPKRLSIIHCPGHQKGDSPQAKGNRLADDTAKKAATETHSSLTVLPAGKRTADGSEFEKRTADGSEFESPKKKAKVE

SEQ ID NO: 7416 - protein, 2216 aa, synthetic construct
MPAAKRVKLDGGDKKYSIGLDIGTNSVGWAVITDEYKVPSKKFKVLGNTDRHSIKKNLIGALLFDSGETAEATRLKRTARRRYTRRKNRICYLQEIFSNEMAKVDDSFFHRLEESFLVEEDKKHERHPIFGNIVDEVAYHEKYPTIYHLRKKLVDSTDKADLRLIYLALAHMIKFRGHFLIEGDLNPDNSDVDKLFIQLVQTYNQLFEENPINASGVDAKAILSARLSKSRRLENLIAQLPGEKKNGLFGNLIALSLGLTPNFKSNFDLAEDAKLQLSKDTYDDDLDNLLAQIGDQYADLFLAAKNLSDAILLSDILRVNTEITKAPLSASMIKRYDEHHQDLTLLKALVRQQLPEKYKEIFFDQSKNGYAGYIDGGASQEEFYKFIKPILEKMDGTEELLVKLNREDLLRKQRTFDNGSIPHQIHLGELHAILRRQEDFYPFLKDNREKIEKILTFRIPYYVGPLARGNSRFAWMTRKSEETITPWNFEEVVDKGASAQSFIERMTNFDKNLPNEKVLPKHSLLYEYFTVYNELTKVKYVTEGMRKPAFLSGEQKKAIVDLLFKTNRKVTVKQLKEDYFKKIECFDSVEISGVEDRFNASLGTYHDLLKIIKDKDFLDNEENEDILEDIVLTLTLFEDREMIEERLKTYAHLFDDKVMKQLKRRRYTGWGRLSRKLINGIRDKQSGKTILDFLKSDGFANRNFMQLIHDDSLTFKEDIQKAQVSGQGDSLHEHIANLAGSPAIKKGILQTVKVVDELVKVMGRHKPENIVIEMARENQTTQKGQKNSRERMKRIEEGIKELGSQILKEHPVENTQLQNEKLYLYYLQNGRDMYVDQELDINRLSDYDVDHIVPQSFLKDDSIDNKVLTRSDKARGKSDNVPSEEVVKKMKNYWRQLLNAKLITQRKFDNLTKAERGGLSELDKAGFIKRQLVETRQITKHVAQILDSRMNTKYDENDKLIREVKVITLKSKLVSDFRKDFQFYKVREINNYHHAHDAYLNAVVGTALIKKYPKLESEFVYGDYKVYDVRKMIAKSEQEIGKATAKYFFYSNIMNFFKTEITLANGEIRKRPLIETNGETGEIVWDKGRDFATVRKVLSMPQVNIVKKTEVQTGGFSKESILPKRNSDKLIARKKDWDPKKYGGFDSPTVAYSVLVVAKVEKGKSKKLKSVKELLGITIMERSSFEKNPIDFLEAKGYKEVKKDLIIKLPKYSLFELENGRKRMLASAGELQKGNELALPSKYVNFLYLASHYEKLKGSPEDNEQKQLFVEQHKHYLDEIIEQISEFSKRVILADANLDKVLSAYNKHRDKPIREQAENIIHLFTLTNLGAPAAFKYFDTTIDRKRYTSTKEVLDATLIHQSITGLYETRIDLSQLGGDGGPAPGGGGSSGGTLGDQGSRGSDPLPEPRVTLTVEGIPTEFLVNTGAEHSVLTKPMGKMGSKRTVVAGATGSKVYPWTTKRLLKIGQKQVTHSFLVIPECPAPLLGRDLLTKLKAQIQFSTEGPQVTWEDRPAMCLVLNLEEEYRLHEKPVPPSIDPSWLQLFPMVWAEKAGMGLANQVPPVVVELKSDASPVAVRQYPMSKEAREGIRPHIQRFLDLGILVPCQSPWNTPLLPVKKPGTNDYRPVQDLREVNKRVQDIHPTVPNPYNLLSSLPPSHTWYSVLDLKDAFFCLKLHPNSQPLFAFEWRDPEKGNTGQLTWTRLPQGFKNSPTLFDEALHRDLASFRALNPQVVMLQYVDDLLVAAPTYRDCKEGTRRLLQELSKLGYRVSAKKAQLCREEVTYLGYLLKGGKRWLTPARKATVMKIPTPTTPRQVREFLGTAGFCRLWIPGFASLAAPLYPLTREKVPFTWTEAHQEAFGRIKEALLSAPALALPDLTKPFALYVDEKEGVARGVLTQTLGPWRRPVAYLSKKLDPVASGWPTCLKAIAAVALLLKDADKLTLGQNVLVIAPHNLESIVRQPPDRWMTNARMTHYQSLLLNERVSFAPPAILNPATLLPVESDDTPIHICSEILAEETGTRPDLRDQPLPGVPAWYTDGSSFIMDGRRQAGAAIVDNKRTVWASNLPEGTSAQKAELIALTQALRLAEGKSINIYTDSRYAFATAHVHGAIYKQRGLLTSAGKDIKNKEEILALLEAIHLPKRVAIIHCPGHQRGTDPVATGNRKADEAAKQAAQSTRILTETTKNAGKRTADGSEFEKRTADGSEFESPKKKAKVE

SEQ ID NO: 7417 - protein, 2125 aa, synthetic construct
MPAAKRVKLDGGDKKYSIGLDIGTNSVGWAVITDEYKVPSKKFKVLGNTDRHSIKKNLIGALLFDSGETAEATRLKRTARRRYTRRKNRICYLQEIFSNEMAKVDDSFFHRLEESFLVEEDKKHERHPIFGNIVDEVAYHEKYPTIYHLRKKLVDSTDKADLRLIYLALAHMIKFRGHFLIEGDLNPDNSDVDKLFIQLVQTYNQLFEENPINASGVDAKAILSARLSKSRRLENLIAQLPGEKKNGLFGNLIALSLGLTPNFKSNFDLAEDAKLQLSKDTYDDDLDNLLAQIGDQYADLFLAAKNLSDAILLSDILRVNTEITKAPLSASMIKRYDEHHQDLTLLKALVRQQLPEKYKEIFFDQSKNGYAGYIDGGASQEEFYKFIKPILEKMDGTEELLVKLNREDLLRKQRTFDNGSIPHQIHLGELHAILRRQEDFYPFLKDNREKIEKILTFRIPYYVGPLARGNSRFAWMTRKSEETITPWNFEEVVDKGASAQSFIERMTNFDKNLPNEKVLPKHSLLYEYFTVYNELTKVKYVTEGMRKPAFLSGEQKKAIVDLLFKTNRKVTVKQLKEDYFKKIECFDSVEISGVEDRFNASLGTYHDLLKIIKDKDFLDNEENEDILEDIVLTLTLFEDREMIEERLKTYAHLFDDKVMKQLKRRRYTGWGRLSRKLINGIRDKQSGKTILDFLKSDGFANRNFMQLIHDDSLTFKEDIQKAQVSGQGDSLHEHIANLAGSPAIKKGILQTVKVVDELVKVMGRHKPENIVIEMARENQTTQKGQKNSRERMKRIEEGIKELGSQILKEHPVENTQLQNEKLYLYYLQNGRDMYVDQELDINRLSDYDVDHIVPQSFLKDDSIDNKVLTRSDKARGKSDNVPSEEVVKKMKNYWRQLLNAKLITQRKFDNLTKAERGGLSELDKAGFIKRQLVETRQITKHVAQILDSRMNTKYDENDKLIREVKVITLKSKLVSDFRKDFQFYKVREINNYHHAHDAYLNAVVGTALIKKYPKLESEFVYGDYKVYDVRKMIAKSEQEIGKATAKYFFYSNIMNFFKTEITLANGEIRKRPLIETNGETGEIVWDKGRDFATVRKVLSMPQVNIVKKTEVQTGGFSKESILPKRNSDKLIARKKDWDPKKYGGFDSPTVAYSVLVVAKVEKGKSKKLKSVKELLGITIMERSSFEKNPIDFLEAKGYKEVKKDLIIKLPKYSLFELENGRKRMLASAGELQKGNELALPSKYVNFLYLASHYEKLKGSPEDNEQKQLFVEQHKHYLDEIIEQISEFSKRVILADANLDKVLSAYNKHRDKPIREQAENIIHLFTLTNLGAPAAFKYFDTTIDRKRYTSTKEVLDATLIHQSITGLYETRIDLSQLGGDGGPAPGGGGSSGGLLGRDLLTKLKAQIQFSTEGPQVTWEDRPAMCLVLNLEEEYRLHEKPVPPSIDPSWLQLFPMVWAEKAGMGLANQVPPVVVELKSDASPVAVRQYPMSKEAREGIRPHIQRFLDLGILVPCQSPWNTPLLPVKKPGTNDYRPVQDLREVNKRVQDIHPTVPNPYNLLSSLPPSHTWYSVLDLKDAFFCLKLHPNSQPLFAFEWRDPEKGNTGQLTWTRLPQGFKNSPTLFNEALHRDLASFRALNPQVVMLQYVDDLLVAAPTYRDCKEGTRRLLQELSKLGYRVSAKKAQLCREEVTYLGYLLKGGKRWLTPARKATVMKIPTPTTPRQVREFLGTAGFCRLWIPGFASLAAPLYPLTRPKVPFTWTEAHQEAFGRIKEALLSAPALALPDLTKPFALYVDEKEGVARGVLTQTLGPWRRPVAYLSKKLDPVASGWPTCLKAIAAVALLLKDADKLTLGQNVLVIAPHNLESIVRQPPDRWMTNARMTHYQSLLLNERVSFAPPAILNPATLLPVESDDTPIHICSEILAEETGTRPDLRDQPLPGVPAWYTDGSSFIMDGRRQAGAAIVDNKRTVWASNLPEGTSAQKAELIALTQALRLAEGKSINIYTDSRYAFATAHVHGAIYKQRGWLTSAGKDIKNKEEILALLEAIHLPKRVAIIHCPGHQRGTDPVATGNRKADEAAKQAAQSTRILTETTKNAGKRTADGSEFEKRTADGSEFESPKKKAKVE

SEQ ID NO: 7418 - protein, 2216 aa, synthetic construct
MPAAKRVKLDGGDKKYSIGLDIGTNSVGWAVITDEYKVPSKKFKVLGNTDRHSIKKNLIGALLFDSGETAEATRLKRTARRRYTRRKNRICYLQEIFSNEMAKVDDSFFHRLEESFLVEEDKKHERHPIFGNIVDEVAYHEKYPTIYHLRKKLVDSTDKADLRLIYLALAHMIKFRGHFLIEGDLNPDNSDVDKLFIQLVQTYNQLFEENPINASGVDAKAILSARLSKSRRLENLIAQLPGEKKNGLFGNLIALSLGLTPNFKSNFDLAEDAKLQLSKDTYDDDLDNLLAQIGDQYADLFLAAKNLSDAILLSDILRVNTEITKAPLSASMIKRYDEHHQDLTLLKALVRQQLPEKYKEIFFDQSKNGYAGYIDGGASQEEFYKFIKPILEKMDGTEELLVKLNREDLLRKQRTFDNGSIPHQIHLGELHAILRRQEDFYPFLKDNREKIEKILTFRIPYYVGPLARGNSRFAWMTRKSEETITPWNFEEVVDKGASAQSFIERMTNFDKNLPNEKVLPKHSLLYEYFTVYNELTKVKYVTEGMRKPAFLSGEQKKAIVDLLFKTNRKVTVKQLKEDYFKKIECFDSVEISGVEDRFNASLGTYHDLLKIIKDKDFLDNEENEDILEDIVLTLTLFEDREMIEERLKTYAHLFDDKVMKQLKRRRYTGWGRLSRKLINGIRDKQSGKTILDFLKSDGFANRNFMQLIHDDSLTFKEDIQKAQVSGQGDSLHEHIANLAGSPAIKKGILQTVKVVDELVKVMGRHKPENIVIEMARENQTTQKGQKNSRERMKRIEEGIKELGSQILKEHPVENTQLQNEKLYLYYLQNGRDMYVDQELDINRLSDYDVDHIVPQSFLKDDSIDNKVLTRSDKARGKSDNVPSEEVVKKMKNYWRQLLNAKLITQRKFDNLTKAERGGLSELDKAGFIKRQLVETRQITKHVAQILDSRMNTKYDENDKLIREVKVITLKSKLVSDFRKDFQFYKVREINNYHHAHDAYLNAVVGTALIKKYPKLESEFVYGDYKVYDVRKMIAKSEQEIGKATAKYFFYSNIMNFFKTEITLANGEIRKRPLIETNGETGEIVWDKGRDFATVRKVLSMPQVNIVKKTEVQTGGFSKESILPKRNSDKLIARKKDWDPKKYGGFDSPTVAYSVLVVAKVEKGKSKKLKSVKELLGITIMERSSFEKNPIDFLEAKGYKEVKKDLIIKLPKYSLFELENGRKRMLASAGELQKGNELALPSKYVNFLYLASHYEKLKGSPEDNEQKQLFVEQHKHYLDEIIEQISEFSKRVILADANLDKVLSAYNKHRDKPIREQAENIIHLFTLTNLGAPAAFKYFDTTIDRKRYTSTKEVLDATLIHQSITGLYETRIDLSQLGGDGGPAPGGGGSSGGTLGDQGSRGSDPLPEPRVTLTVEGIPTEFLVNTGAEHSVLTKPMGKMGSKRTVVAGATGSKVYPWTTKRLLKIGQKQVTHSFLVIPECPAPLLGRDLLTKLKAQIQFSTEGPQVTWEDRPAMCLVLNLEEEYRLHEKPVPPSIDPSWLQLFPMVWAEKAGMGLANQVPPVVVELKSDASPVAVRQYPMSKEAREGIRPHIQRFLDLGILVPCQSPWNTPLLPVKKPGTNDYRPVQDLREVNKRVQDIHPTVPNPYNLLSSLPPSHTWYSVLDLKDAFFCLKLHPNSQPLFAFEWRDPEKGNTGQLTWTRLPQGFKNSPTLFNEALHRDLASFRALNPQVVMLQYVDDLLVAAPTYRDCKEGTRRLLQELSKLGYRVSAKKAQLCREEVTYLGYLLKGGKRWLTPARKATVMKIPTPTTPRQVREFLGTAGFCRLWIPGFASLAAPLYPLTRPKVPFTWTEAHQEAFGRIKEALLSAPALALPDLTKPFALYVDEKEGVARGVLTQTLGPWRRPVAYLSKKLDPVASGWPTCLKAIAAVALLLKDADKLTLGQNVLVIAPHNLESIVRQPPDRWMTNARMTHYQSLLLNERVSFAPPAILNPATLLPVESDDTPIHICSEILAEETGTRPDLRDQPLPGVPAWYTDGSSFIMDGRRQAGAAIVDNKRTVWASNLPEGTSAQKAELIALTQALRLAEGKSINIYTDSRYAFATAHVHGAIYKQRGWLTSAGKDIKNKEEILALLEAIHLPKRVAIIHCPGHQRGTDPVATGNRKADEAAKQAAQSTRILTETTKNAGKRTADGSEFEKRTADGSEFESPKKKAKVE

SEQ ID NO: 7419 - protein, 2094 aa, synthetic construct
MPAAKRVKLDGGDKKYSIGLDIGTNSVGWAVITDEYKVPSKKFKVLGNTDRHSIKKNLIGALLFDSGETAEATRLKRTARRRYTRRKNRICYLQEIFSNEMAKVDDSFFHRLEESFLVEEDKKHERHPIFGNIVDEVAYHEKYPTIYHLRKKLVDSTDKADLRLIYLALAHMIKFRGHFLIEGDLNPDNSDVDKLFIQLVQTYNQLFEENPINASGVDAKAILSARLSKSRRLENLIAQLPGEKKNGLFGNLIALSLGLTPNFKSNFDLAEDAKLQLSKDTYDDDLDNLLAQIGDQYADLFLAAKNLSDAILLSDILRVNTEITKAPLSASMIKRYDEHHQDLTLLKALVRQQLPEKYKEIFFDQSKNGYAGYIDGGASQEEFYKFIKPILEKMDGTEELLVKLNREDLLRKQRTFDNGSIPHQIHLGELHAILRRQEDFYPFLKDNREKIEKILTFRIPYYVGPLARGNSRFAWMTRKSEETITPWNFEEVVDKGASAQSFIERMTNFDKNLPNEKVLPKHSLLYEYFTVYNELTKVKYVTEGMRKPAFLSGEQKKAIVDLLFKTNRKVTVKQLKEDYFKKIECFDSVEISGVEDRFNASLGTYHDLLKIIKDKDFLDNEENEDILEDIVLTLTLFEDREMIEERLKTYAHLFDDKVMKQLKRRRYTGWGRLSRKLINGIRDKQSGKTILDFLKSDGFANRNFMQLIHDDSLTFKEDIQKAQVSGQGDSLHEHIANLAGSPAIKKGILQTVKVVDELVKVMGRHKPENIVIEMARENQTTQKGQKNSRERMKRIEEGIKELGSQILKEHPVENTQLQNEKLYLYYLQNGRDMYVDQELDINRLSDYDVDHIVPQSFLKDDSIDNKVLTRSDKARGKSDNVPSEEVVKKMKNYWRQLLNAKLITQRKFDNLTKAERGGLSELDKAGFIKRQLVETRQITKHVAQILDSRMNTKYDENDKLIREVKVITLKSKLVSDFRKDFQFYKVREINNYHHAHDAYLNAVVGTALIKKYPKLESEFVYGDYKVYDVRKMIAKSEQEIGKATAKYFFYSNIMNFFKTEITLANGEIRKRPLIETNGETGEIVWDKGRDFATVRKVLSMPQVNIVKKTEVQTGGFSKESILPKRNSDKLIARKKDWDPKKYGGFDSPTVAYSVLVVAKVEKGKSKKLKSVKELLGITIMERSSFEKNPIDFLEAKGYKEVKKDLIIKLPKYSLFELENGRKRMLASAGELQKGNELALPSKYVNFLYLASHYEKLKGSPEDNEQKQLFVEQHKHYLDEIIEQISEFSKRVILADANLDKVLSAYNKHRDKPIREQAENIIHLFTLTNLGAPAAFKYFDTTIDRKRYTSTKEVLDATLIHQSITGLYETRIDLSQLGGDGGPAPGGGGSSGGTLNLEDEYRLYETSAEPEVSPGSTWLSDFPQAWAETGGMGLAVRQAPLIIPLKATSTPVSIKQYPMSQEAKLGIKPHIQRLLDQGILVPCQSPWNTPLLPVKKPGTNDYRPVQDLREVNKRVEDIHPTVPNPYNLLSGLPPSHRWYTVLDLKDAFFCLRLHPTSQPLFAFEWRDPGMGISGQLTWTRLPQGFKNSPTLFNEALHRDLADFRIQHPDLILLQYVDDILLAATSELDCQQGTRALLLTLGNLGYRASAKKAQLCQKQVKYLGYLLKEGQRWLTEARKETVMGQPTPKTPRQLREFLGTAGFCRLWIPGFAEMAAPLYPLTKPGTLFNWGPDQQKAYQEIKQALLTAPALGLPDLTKPFELFVDEKQGYAKGVLTQKLGPWRRPVAYLSKKLDPVAAGWPPCLRMVAAIAVLRKDAGKLTMGQPLVILAPHAVEALVKQPPDRWLSNARMTHYQAMLLDTDRVQFGPVVALNPATLLPLPEEGAPHDCLEILAETHGTRPDLTDQPIPDADHTWYTDGSSFLQEGQRKAGAAVTTETEVIWARALPAGTSAQRAELIALTQALKMAEGKRLNVYTDSRYAFATAHIHGEIYRRRGWLTSEGREIKNKSEILALLKALFLPKRLSIIHCLGHQKGDSAEARGNRLADQAAREAAIKTPPDTSTLLAGKRTADGSEFEKRTADGSEFESPKKKAKVE

SEQ ID NO: 7420 - protein, 2094 aa, synthetic construct
MPAAKRVKLDGGDKKYSIGLDIGTNSVGWAVITDEYKVPSKKFKVLGNTDRHSIKKNLIGALLFDSGETAEATRLKRTARRRYTRRKNRICYLQEIFSNEMAKVDDSFFHRLEESFLVEEDKKHERHPIFGNIVDEVAYHEKYPTIYHLRKKLVDSTDKADLRLIYLALAHMIKFRGHFLIEGDLNPDNSDVDKLFIQLVQTYNQLFEENPINASGVDAKAILSARLSKSRRLENLIAQLPGEKKNGLFGNLIALSLGLTPNFKSNFDLAEDAKLQLSKDTYDDDLDNLLAQIGDQYADLFLAAKNLSDAILLSDILRVNTEITKAPLSASMIKRYDEHHQDLTLLKALVRQQLPEKYKEIFFDQSKNGYAGYIDGGASQEEFYKFIKPILEKMDGTEELLVKLNREDLLRKQRTFDNGSIPHQIHLGELHAILRRQEDFYPFLKDNREKIEKILTFRIPYYVGPLARGNSRFAWMTRKSEETITPWNFEEVVDKGASAQSFIERMTNFDKNLPNEKVLPKHSLLYEYFTVYNELTKVKYVTEGMRKPAFLSGEQKKAIVDLLFKTNRKVTVKQLKEDYFKKIECFDSVEISGVEDRFNASLGTYHDLLKIIKDKDFLDNEENEDILEDIVLTLTLFEDREMIEERLKTYAHLFDDKVMKQLKRRRYTGWGRLSRKLINGIRDKQSGKTILDFLKSDGFANRNFMQLIHDDSLTFKEDIQKAQVSGQGDSLHEHIANLAGSPAIKKGILQTVKVVDELVKVMGRHKPENIVIEMARENQTTQKGQKNSRERMKRIEEGIKELGSQILKEHPVENTQLQNEKLYLYYLQNGRDMYVDQELDINRLSDYDVDHIVPQSFLKDDSIDNKVLTRSDKARGKSDNVPSEEVVKKMKNYWRQLLNAKLITQRKFDNLTKAERGGLSELDKAGFIKRQLVETRQITKHVAQILDSRMNTKYDENDKLIREVKVITLKSKLVSDFRKDFQFYKVREINNYHHAHDAYLNAVVGTALIKKYPKLESEFVYGDYKVYDVRKMIAKSEQEIGKATAKYFFYSNIMNFFKTEITLANGEIRKRPLIETNGETGEIVWDKGRDFATVRKVLSMPQVNIVKKTEVQTGGFSKESILPKRNSDKLIARKKDWDPKKYGGFDSPTVAYSVLVVAKVEKGKSKKLKSVKELLGITIMERSSFEKNPIDFLEAKGYKEVKKDLIIKLPKYSLFELENGRKRMLASAGELQKGNELALPSKYVNFLYLASHYEKLKGSPEDNEQKQLFVEQHKHYLDEIIEQISEFSKRVILADANLDKVLSAYNKHRDKPIREQAENIIHLFTLTNLGAPAAFKYFDTTIDRKRYTSTKEVLDATLIHQSITGLYETRIDLSQLGGDGGPAPGGGGSSGGTLGIEDEYRLHETSTEPDVSLGSTWLSDFPQAWAETGGMGLAVRQAPLIIPLKATSTPVSIQQYPMSHEARLGIKPHIQRLLDQGILVPCQSPWNTPLLPVKKPGTNDYRPVQDLREVNKRVEDIHPTVPNPYNLLSGLPPSHQWYTVLDLKDAFFCLRLHPTSQPLFAFEWRDPGMGISGQLTWTRLPQGFKNSPTLFDEALHRDLADFRIQHPDLILLQYVDDILLAATSELDCQQGTRALLQTLGDLGYRASAKKAQICQKQVKYLGYLLREGQRWLTEARKETVMGQPVPKTPRQLREFLGTAGFCRLWIPGFAEMAAPLYPLTKTGTLFSWGPDQQKAYQEIKQALLTAPALGLPDLTKPFELFVDEKQGYAKGVLTQKLGPWRRPVAYLSKKLDPVAAGWPPCLRMVAAIAVLTKDAGKLTMGQPLVILAPHAVEALVKQPPDRWLSNARMTHYQAMLLDTDRVQFGPVVALNPATLLPLPEEGAPHDCLEILAETHGTRPDLTDQPIPDADHTWYTDGSSFLQEGQRKAGAAVTTETEVIWAGALPAGTSAQRAELIALTQALKMAEGKRLNVYTDSRYAFATAHIHGEIYRRRGLLTSEGREIKNKSEILALLKALFLPKRLSIIHCLGHQKGDSAEARGNRLADQAAREAAIKTPPDTSTLLAGKRTADGSEFEKRTADGSEFESPKKKAKVE

SEQ ID NO: 7421 - protein, 2094 aa, synthetic construct
MPAAKRVKLDGGDKKYSIGLDIGTNSVGWAVITDEYKVPSKKFKVLGNTDRHSIKKNLIGALLFDSGETAEATRLKRTARRRYTRRKNRICYLQEIFSNEMAKVDDSFFHRLEESFLVEEDKKHERHPIFGNIVDEVAYHEKYPTIYHLRKKLVDSTDKADLRLIYLALAHMIKFRGHFLIEGDLNPDNSDVDKLFIQLVQTYNQLFEENPINASGVDAKAILSARLSKSRRLENLIAQLPGEKKNGLFGNLIALSLGLTPNFKSNFDLAEDAKLQLSKDTYDDDLDNLLAQIGDQYADLFLAAKNLSDAILLSDILRVNTEITKAPLSASMIKRYDEHHQDLTLLKALVRQQLPEKYKEIFFDQSKNGYAGYIDGGASQEEFYKFIKPILEKMDGTEELLVKLNREDLLRKQRTFDNGSIPHQIHLGELHAILRRQEDFYPFLKDNREKIEKILTFRIPYYVGPLARGNSRFAWMTRKSEETITPWNFEEVVDKGASAQSFIERMTNFDKNLPNEKVLPKHSLLYEYFTVYNELTKVKYVTEGMRKPAFLSGEQKKAIVDLLFKTNRKVTVKQLKEDYFKKIECFDSVEISGVEDRFNASLGTYHDLLKIIKDKDFLDNEENEDILEDIVLTLTLFEDREMIEERLKTYAHLFDDKVMKQLKRRRYTGWGRLSRKLINGIRDKQSGKTILDFLKSDGFANRNFMQLIHDDSLTFKEDIQKAQVSGQGDSLHEHIANLAGSPAIKKGILQTVKVVDELVKVMGRHKPENIVIEMARENQTTQKGQKNSRERMKRIEEGIKELGSQILKEHPVENTQLQNEKLYLYYLQNGRDMYVDQELDINRLSDYDVDHIVPQSFLKDDSIDNKVLTRSDKARGKSDNVPSEEVVKKMKNYWRQLLNAKLITQRKFDNLTKAERGGLSELDKAGFIKRQLVETRQITKHVAQILDSRMNTKYDENDKLIREVKVITLKSKLVSDFRKDFQFYKVREINNYHHAHDAYLNAVVGTALIKKYPKLESEFVYGDYKVYDVRKMIAKSEQEIGKATAKYFFYSNIMNFFKTEITLANGEIRKRPLIETNGETGEIVWDKGRDFATVRKVLSMPQVNIVKKTEVQTGGFSKESILPKRNSDKLIARKKDWDPKKYGGFDSPTVAYSVLVVAKVEKGKSKKLKSVKELLGITIMERSSFEKNPIDFLEAKGYKEVKKDLIIKLPKYSLFELENGRKRMLASAGELQKGNELALPSKYVNFLYLASHYEKLKGSPEDNEQKQLFVEQHKHYLDEIIEQISEFSKRVILADANLDKVLSAYNKHRDKPIREQAENIIHLFTLTNLGAPAAFKYFDTTIDRKRYTSTKEVLDATLIHQSITGLYETRIDLSQLGGDGGPAPGGGGSSGGTLGIEDEYRLHETSTEPDVSLGSTWLSDFPQAWAETGGMGLAVRQAPLIIPLKATSTPVSIQQYPMSHEARLGIKPHIQRLLDQGILVPCQSPWNTPLLPVKKPGTNDYRPVQDLREVNKRVEDIHPTVPNPYNLLSGLPPSHQWYTVLDLKDAFFCLRLHPTSQPLFAFEWRDPGMGISGQLTWTRLPQGFKNSPTLFNEALHRDLADFRIQHPDLILLQYVDDILLAATSELDCQQGTRALLQTLGDLGYRASAKKAQICQKQVKYLGYLLREGQRWLTEARKETVMGQPVPKTPRQLREFLGTAGFCRLWIPGFAEMAAPLYPLTKPGTLFSWGPDQQKAYQEIKQALLTAPALGLPDLTKPFELFVDEKQGYAKGVLTQKLGPWRRPVAYLSKKLDPVAAGWPPCLRMVAAIAVLTKDAGKLTMGQPLVILAPHAVEALVKQPPDRWLSNARMTHYQAMLLDTDRVQFGPVVALNPATLLPLPEEGAPHDCLEILAETHGTRPDLTDQPIPDADHTWYTDGSSFLQEGQRKAGAAVTTETEVIWAGALPAGTSAQRAELIALTQALKMAEGKRLNVYTDSRYAFATAHIHGEIYRRRGWLTSEGREIKNKSEILALLKALFLPKRLSIIHCLGHQKGDSAEARGNRLADQAAREAAIKTPPDTSTLLAGKRTADGSEFEKRTADGSEFESPKKKAKVE

SEQ ID NO: 7422 - protein, 2094 aa, synthetic construct; identical to SEQ ID NO: 7421

SEQ ID NO: 7423 - protein, 2094 aa, synthetic construct
MPAAKRVKLDGGDKKYSIGLDIGTNSVGWAVITDEYKVPSKKFKVLGNTDRHSIKKNLIGALLFDSGETAEATRLKRTARRRYTRRKNRICYLQEIFSNEMAKVDDSFFHRLEESFLVEEDKKHERHPIFGNIVDEVAYHEKYPTIYHLRKKLVDSTDKADLRLIYLALAHMIKFRGHFLIEGDLNPDNSDVDKLFIQLVQTYNQLFEENPINASGVDAKAILSARLSKSRRLENLIAQLPGEKKNGLFGNLIALSLGLTPNFKSNFDLAEDAKLQLSKDTYDDDLDNLLAQIGDQYADLFLAAKNLSDAILLSDILRVNTEITKAPLSASMIKRYDEHHQDLTLLKALVRQQLPEKYKEIFFDQSKNGYAGYIDGGASQEEFYKFIKPILEKMDGTEELLVKLNREDLLRKQRTFDNGSIPHQIHLGELHAILRRQEDFYPFLKDNREKIEKILTFRIPYYVGPLARGNSRFAWMTRKSEETITPWNFEEVVDKGASAQSFIERMTNFDKNLPNEKVLPKHSLLYEYFTVYNELTKVKYVTEGMRKPAFLSGEQKKAIVDLLFKTNRKVTVKQLKEDYFKKIECFDSVEISGVEDRFNASLGTYHDLLKIIKDKDFLDNEENEDILEDIVLTLTLFEDREMIEERLKTYAHLFDDKVMKQLKRRRYTGWGRLSRKLINGIRDKQSGKTILDFLKSDGFANRNFMQLIHDDSLTFKEDIQKAQVSGQGDSLHEHIANLAGSPAIKKGILQTVKVVDELVKVMGRHKPENIVIEMARENQTTQKGQKNSRERMKRIEEGIKELGSQILKEHPVENTQLQNEKLYLYYLQNGRDMYVDQELDINRLSDYDVDHIVPQSFLKDDSIDNKVLTRSDKARGKSDNVPSEEVVKKMKNYWRQLLNAKLITQRKFDNLTKAERGGLSELDKAGFIKRQLVETRQITKHVAQILDSRMNTKYDENDKLIREVKVITLKSKLVSDFRKDFQFYKVREINNYHHAHDAYLNAVVGTALIKKYPKLESEFVYGDYKVYDVRKMIAKSEQEIGKATAKYFFYSNIMNFFKTEITLANGEIRKRPLIETNGETGEIVWDKGRDFATVRKVLSMPQVNIVKKTEVQTGGFSKESILPKRNSDKLIARKKDWDPKKYGGFDSPTVAYSVLVVAKVEKGKSKKLKSVKELLGITIMERSSFEKNPIDFLEAKGYKEVKKDLIIKLPKYSLFELENGRKRMLASAGELQKGNELALPSKYVNFLYLASHYEKLKGSPEDNEQKQLFVEQHKHYLDEIIEQISEFSKRVILADANLDKVLSAYNKHRDKPIREQAENIIHLFTLTNLGAPAAFKYFDTTIDRKRYTSTKEVLDATLIHQSITGLYETRIDLSQLGGDGGPAPGGGGSSGGTLNIEDEYRLHETSKEPDVSLGSTWLSDFPQAWAETGGMGLAVRQAPLIIPLKATSTPVSIKQYPMSQEARLGIKPHIQRLLDQGILVPCQSPWNTPLLPVKKPGTNDYRPVQDLREVNKRVEDIHPTVPNPYNLLSGLPPSHQWYTVLDLKDAFFCLRLHPTSQPLFAFEWRDPEMGISGQLTWTRLPQGFKNSPTLFDEALHRDLAGFRIQHPDLILLQYVDDLLLAATSELDCQQGTRALLQTLGDLGYRASAKKAQICQKQVKYLGYLLKEGQRWLTEARKETVMGQPIPKTPRQLREFLGTAGFCRLWIPGFAEMAAPLYPLTKTGTLFNWGPDQQKAFQEIKQALLTAPALGLPDLTKPFELFVDEKQGYAKGVLTQKLGPWRRPVAYLSKKLDPVAAGWPPCLRMVAAIAVLTKDAGKLTMGQPLVILAPHAVEALVKQPPDRWLSNARMTHYQALLLDTDRVQFGPVVALNPATLLPLPEEGLQHDCLDILAEAHGTRSDLMDQPLPDADHTWYTDGSSFLQEGQRKAGAAVTTETEVIWARALPAGTSAQRAELIALTQALKMAEGKKLNVYTDSRYAFATAHIHGEIYRRRGLLTSEGKEIKNKDEILALLKALFLPKRLSIIHCPGHQKGNSAEARGNRMADQAAREVATRETPETSTLLAGKRTADGSEFEKRTADGSEFESPKKKAKVE

SEQ ID NO: 7424 - protein, 2094 aa, synthetic construct
MPAAKRVKLDGGDKKYSIGLDIGTNSVGWAVITDEYKVPSKKFKVLGNTDRHSIKKNLIGALLFDSGETAEATRLKRTARRRYTRRKNRICYLQEIFSNEMAKVDDSFFHRLEESFLVEEDKKHERHPIFGNIVDEVAYHEKYPTIYHLRKKLVDSTDKADLRLIYLALAHMIKFRGHFLIEGDLNPDNSDVDKLFIQLVQTYNQLFEENPINASGVDAKAILSARLSKSRRLENLIAQLPGEKKNGLFGNLIALSLGLTPNFKSNFDLAEDAKLQLSKDTYDDDLDNLLAQIGDQYADLFLAAKNLSDAILLSDILRVNTEITKAPLSASMIKRYDEHHQDLTLLKALVRQQLPEKYKEIFFDQSKNGYAGYIDGGASQEEFYKFIKPILEKMDGTEELLVKLNREDLLRKQRTFDNGSIPHQIHLGELHAILRRQEDFYPFLKDNREKIEKILTFRIPYYVGPLARGNSRFAWMTRKSEETITPWNFEEVVDKGASAQSFIERMTNFDKNLPNEKVLPKHSLLYEYFTVYNELTKVKYVTEGMRKPAFLSGEQKKAIVDLLFKTNRKVTVKQLKEDYFKKIECFDSVEISGVEDRFNASLGTYHDLLKIIKDKDFLDNEENEDILEDIVLTLTLFEDREMIEERLKTYAHLFDDKVMKQLKRRRYTGWGRLSRKLINGIRDKQSGKTILDFLKSDGFANRNFMQLIHDDSLTFKEDIQKAQVSGQGDSLHEHIANLAGSPAIKKGILQTVKVVDELVKVMGRHKPENIVIEMARENQTTQKGQKNSRERMKRIEEGIKELGSQILKEHPVENTQLQNEKLYLYYLQNGRDMYVDQELDINRLSDYDVDHIVPQSFLKDDSIDNKVLTRSDKARGKSDNVPSEEVVKKMKNYWRQLLNAKLITQRKFDNLTKAERGGLSELDKAGFIKRQLVETRQITKHVAQILDSRMNTKYDENDKLIREVKVITLKSKLVSDFRKDFQFYKVREINNYHHAHDAYLNAVVGTALIKKYPKLESEFVYGDYKVYDVRKMIAKSEQEIGKATAKYFFYSNIMNFFKTEITLANGEIRKRPLIETNGETGEIVWDKGRDFATVRKVLSMPQVNIVKKTEVQTGGFSKESILPKRNSDKLIARKKDWDPKKYGGFDSPTVAYSVLVVAKVEKGKSKKLKSVKELLGITIMERSSFEKNPIDFLEAKGYKEVKKDLIIKLPKYSLFELENGRKRMLASAGELQKGNELALPSKYVNFLYLASHYEKLKGSPEDNEQKQLFVEQHKHYLDEIIEQISEFSKRVILADANLDKVLSAYNKHRDKPIREQAENIIHLFTLTNLGAPAAFKYFDTTIDRKRYTSTKEVLDATLIHQSITGLYETRIDLSQLGGDGGPAPGGGGSSGGTLNIEDEYRLHETSKGPDVPLGSTWLSDFPQAWAETGGMGLAVRQAPLIIPLKATSTPVSIKQYPMSQEARLGIKPHIQRLLDQGILVPCQSPWNTPLLPVKKPGTNDYRPVQDLREVNKRVEDIHPTVPNPYNLLSGLPPSHQWYTVLDLKDAFFCLRLHPTSQSLFAFEWRDPEMGISGQLTWTRLPQGFKNSPTLFNEALHRDLADFRIQHPDLILLQYVDDLLLAATSELDCQQGTRALLQTLGDLGYRASAKKAQICQKQVKYLGYLLKEGQRWLTEARKETVMGQPTPKTPRQLREFLGKAGFCRLFIPGFAEMAAPLYPLTKPGTLFEWGPDQQKAYQEIKQALLTAPALGLPDLTKPFELFVDEKQGYAKGVLTQKLGPWRRPVAYLSKKLDPVAAGWPPCLRMVAAIAVLTKDAGKLTMGQPLVILAPHAVEALVKQPPDRWLSNARMTHYQALLLDTDRVQFGPIVALNPATLLPLPEEGLQHDCLDILAEAHGTRPDLTDQPLPDADHTWYTDGSSFLQEGQRKAGAAVTTETEVVWAKALPAGTSAQRAELIALTQALKMAEGKKLNVYTDSRYAFATAHIHGEIYRRRGWLTSEGKEIKNKDEILALLKALFLPKRLSIIHCPGHQKGNRAEARGNRMADQAAREVATRETPETSTLLAGKRTADGSEFEKRTADGSEFESPKKKAKVE

SEQ ID NO: 7425 - protein, 2094 aa, synthetic construct
MPAAKRVKLDGGDKKYSIGLDIGTNSVGWAVITDEYKVPSKKFKVLGNTDRHSIKKNLIGALLFDSGETAEATRLKRTARRRYTRRKNRICYLQEIFSNEMAKVDDSFFHRLEESFLVEEDKKHERHPIFGNIVDEVAYHEKYPTIYHLRKKLVDSTDKADLRLIYLALAHMIKFRGHFLIEGDLNPDNSDVDKLFIQLVQTYNQLFEENPINASGVDAKAILSARLSKSRRLENLIAQLPGEKKNGLFGNLIALSLGLTPNFKSNFDLAEDAKLQLSKDTYDDDLDNLLAQIGDQYADLFLAAKNLSDAILLSDILRVNTEITKAPLSASMIKRYDEHHQDLTLLKALVRQQLPEKYKEIFFDQSKNGYAGYIDGGASQEEFYKFIKPILEKMDGTEELLVKLNREDLLRKQRTFDNGSIPHQIHLGELHAILRRQEDFYPFLKDNREKIEKILTFRIPYYVGPLARGNSRFAWMTRKSEETITPWNFEEVVDKGASAQSFIERMTNFDKNLPNEKVLPKHSLLYEYFTVYNELTKVKYVTEGMRKPAFLSGEQKKAIVDLLFKTNRKVTVKQLKEDYFKKIECFDSVEISGVEDRFNASLGTYHDLLKIIKDKDFLDNEENEDILEDIVLTLTLFEDREMIEERLKTYAHLFDDKVMKQLKRRRYTGWGRLSRKLINGIRDKQSGKTILDFLKSDGFANRNFMQLIHDDSLTFKEDIQKAQVSGQGDSLHEHIANLAGSPAIKKGILQTVKVVDELVKVMGRHKPENIVIEMARENQTTQKGQKNSRERMKRIEEGIKELGSQILKEHPVENTQLQNEKLYLYYLQNGRDMYVDQELDINRLSDYDVDHIVPQSFLKDDSIDNKVLTRSDKARGKSDNVPSEEVVKKMKNYWRQLLNAKLITQRKFDNLTKAERGGLSELDKAGFIKRQLVETRQITKHVAQILDSRMNTKYDENDKLIREVKVITLKSKLVSDFRKDFQFYKVREINNYHHAHDAYLNAVVGTALIKKYPKLESEFVYGDYKVYDVRKMIAKSEQEIGKATAKYFFYSNIMNFFKTEITLANGEIRKRPLIETNGETGEIVWDKGRDFATVRKVLSMPQVNIVKKTEVQTGGFSKESILPKRNSDKLIARKKDWDPKKYGGFDSPTVAYSVLVVAKVEKGKSKKLKSVKELLGITIMERSSFEKNPIDFLEAKGYKEVKKDLIIKLPKYSLFELENGRKRMLASAGELQKGNELALPSKYVNFLYLASHYEKLKGSPEDNEQKQLFVEQHKHYLDEIIEQISEFSKRVILADANLDKVLSAYNKHRDKPIREQAENIIHLFTLTNLGAPAAFKYFDTTIDRKRYTSTKEVLDATLIHQSITGLYETRIDLSQLGGDGGPAPGGGGSSGGTLNIEDEHRLHETSKEPDVSLGSTWLSDFPQAWAETGGMGLAVRQAPLIIPLKATSTPVSIKQYPMSQEARLGIKPHIQRLLDQGILVPCQSPWNTPLLPVKKPGTNDYRPVQDLREVNKRVEDIHPTVPNPYNLLSGLPPSHQWYTVLDLKDAFFCLRLHPTSQPLFAFEWRDPEMGISGQLTWTRLPQGFKNSPTLFNEALHRDLADFRIQHPDLILLQYVDDLLLAATSELDCQQGTRALLQTLGNLGYRASAKKAQICQKQVKYLGYLLKEGQRWLTEARKETVMGQPTPKTPRQLREFLGTAGFCRLWIPGFAEMAAPLYPLTKPGTLFNWGPDQQKAYQEIKQALLTAPALGLPDLTKPFELFVDEKQGYAKGVLTQKLGPWRRPVAYLSKKLDPVAAGWPPCLRMVAAIAVLTKDAGKLTMGQPLVILAPHAVEALVKQPPDRWLSNARMTHYQALLLDTDRVQFGPVVALNPATLLPLPEEGLQHNCLDILAEAHGTRPDLTDQPLPDADHTWYTDGSSLLQEGQRKAGAAVTTETEVIWAKALPAGTSAQRAELIALTQALKMAEGKKLNVYTDSRYAFATAHIHGEIYRRRGWLTSEGKEIKNKDEILALLKALFLPKRLSIIHCPGHQKGHSAEARGNRMADQAARKAAITETPDTSTLLAGKRTADGSEFEKRTADGSEFESPKKKAKVE

SEQ ID NO: 7426 - protein, 2094 aa, synthetic construct; identical to SEQ ID NO: 7425

SEQ ID NO: 7427 - protein, 2114 aa, synthetic construct
MPAAKRVKLDGGDKKYSIGLDIGTNSVGWAVITDEYKVPSKKFKVLGNTDRHSIKKNLIGALLFDSGETAEATRLKRTARRRYTRRKNRICYLQEIFSNEMAKVDDSFFHRLEESFLVEEDKKHERHPIFGNIVDEVAYHEKYPTIYHLRKKLVDSTDKADLRLIYLALAHMIKFRGHFLIEGDLNPDNSDVDKLFIQLVQTYNQLFEENPINASGVDAKAILSARLSKSRRLENLIAQLPGEKKNGLFGNLIALSLGLTPNFKSNFDLAEDAKLQLSKDTYDDDLDNLLAQIGDQYADLFLAAKNLSDAILLSDILRVNTEITKAPLSASMIKRYDEHHQDLTLLKALVRQQLPEKYKEIFFDQSKNGYAGYIDGGASQEEFYKFIKPILEKMDGTEELLVKLNREDLLRKQRTFDNGSIPHQIHLGELHAILRRQEDFYPFLKDNREKIEKILTFRIPYYVGPLARGNSRFAWMTRKSEETITPWNFEEVVDKGASAQSFIERMTNFDKNLPNEKVLPKHSLLYEYFTVYNELTKVKYVTEGMRKPAFLSGEQKKAIVDLLFKTNRKVTVKQLKEDYFKKIECFDSVEISGVEDRFNASLGTYHDLLKIIKDKDFLDNEENEDILEDIVLTLTLFEDREMIEERLKTYAHLFDDKVMKQLKRRRYTGWGRLSRKLINGIRDKQSGKTILDFLKSDGFANRNFMQLIHDDSLTFKEDIQKAQVSGQGDSLHEHIANLAGSPAIKKGILQTVKVVDELVKVMGRHKPENIVIEMARENQTTQKGQKNSRERMKRIEEGIKELGSQILKEHPVENTQLQNEKLYLYYLQNGRDMYVDQELDINRLSDYDVDHIVPQSFLKDDSIDNKVLTRSDKARGKSDNVPSEEVVKKMKNYWRQLLNAKLITQRKFDNLTKAERGGLSELDKAGFIKRQLVETRQITKHVAQILDSRMNTKYDENDKLIREVKVITLKSKLVSDFRKDFQFYKVREINNYHHAHDAYLNAVVGTALIKKYPKLESEFVYGDYKVYDVRKMIAKSEQEIGKATAKYFFYSNIMNFFKTEITLANGEIRKRPLIETNGETGEIVWDKGRDFATVRKVLSMPQVNIVKKTEVQTGGFSKESILPKRNSDKLIARKKDWDPKKYGGFDSPTVAYSVLVVAKVEKGKSKKLKSVKELLGITIMERSSFEKNPIDFLEAKGYKEVKKDLIIKLPKYSLFELENGRKRMLASAGELQKGNELALPSKYVNFLYLASHYEKLKGSPEDNEQKQLFVEQHKHYLDEIIEQISEFSKRVILADANLDKVLSAYNKHRDKPIREQAENIIHLFTLTNLGAPAAFKYFDTTIDRKRYTSTKEVLDATLIHQSITGLYETRIDLSQLGGDGGPAPGGGGSSGGVQEISDSRPMLHIYLNGRRFLGLLDTGADKTCIAGRDWPANWPIHQTESSLQGLGMACGVARSSQPLRWQHEDKSGIIHPFVIPTLPFTLWGRDIMKDIKVRLMTDSPDDSQDLMIGAIESNLFADQISWKSDQPVWLNQWPLKQEKLQALQQLVTEQLQLGHLEESNSPWNTPVFVIKKKSGKWRLLQDLRAVNATMHDMGALQPGLPSPVAVPKGWEIIIIDLQDCFFNIKLHPEDCKRFAFSVPSPNFKRPYQRFQWKVLPQGMKNSPTLCQKFVDKAILTVRDKYQDSYIVHYMDDILLAHPSRSIVDEILTSMIQALNKHGLVVSTEKIQKYDNLKYLGTHIQGDSVSYQKLQIRTDKLRTLNDFQKLLGNINWIRPFLKLTTGELKPLFEILNPDSNPISTRKLTPEACKALQLMNERLSTARVKRLDLSQPWSLCILKTEYTPTACLWQDGVVEWIHLPHISPKVITPYDIFCTQLIIKGRHRSKELFSKDPDYIVVPYTKVQFDLLLQEKEDWPISLLGFLGEVHFHLPKDPLLTFTLQTAIIFPHMTSTTPLEKGIVIFTDGSANGRSVTYIQGREPIIKENTQNTAQQAEIVAVITAFEEVSQPFNLYTDSKYVTGLFPEIETATLSPRTKIYTELKHLQRLIHKRQEKFYIGHIRGHTGLPGPLAQGNAYADSLTRILTAAGKRTADGSEFEKRTADGSEFESPKKKAKVE

SEQ ID NO: 7428 - protein, 2114 aa, synthetic construct
MPAAKRVKLDGGDKKYSIGLDIGTNSVGWAVITDEYKVPSKKFKVLGNTDRHSIKKNLIGALLFDSGETAEATRLKRTARRRYTRRKNRICYLQEIFSNEMAKVDDSFFHRLEESFLVEEDKKHERHPIFGNIVDEVAYHEKYPTIYHLRKKLVDSTDKADLRLIYLALAHMIKFRGHFLIEGDLNPDNSDVDKLFIQLVQTYNQLFEENPINASGVDAKAILSARLSKSRRLENLIAQLPGEKKNGLFGNLIALSLGLTPNFKSNFDLAEDAKLQLSKDTYDDDLDNLLAQIGDQYADLFLAAKNLSDAILLSDILRVNTEITKAPLSASMIKRYDEHHQDLTLLKALVRQQLPEKYKEIFFDQSKNGYAGYIDGGASQEEFYKFIKPILEKMDGTEELLVKLNREDLLRKQRTFDNGSIPHQIHLGELHAILRRQEDFYPFLKDNREKIEKILTFRIPYYVGPLARGNSRFAWMTRKSEETITPWNFEEVVDKGASAQSFIERMTNFDKNLPNEKVLPKHSLLYEYFTVYNELTKVKYVTEGMRKPAFLSGEQKKAIVDLLFKTNRKVTVKQLKEDYFKKIECFDSVEISGVEDRFNASLGTYHDLLKIIKDKDFLDNEENEDILEDIVLTLTLFEDREMIEERLKTYAHLFDDKVMKQLKRRRYTGWGRLSRKLINGIRDKQSGKTILDFLKSDGFANRNFMQLIHDDSLTFKEDIQKAQVSGQGDSLHEHIANLAGSPAIKKGILQTVKVVDELVKVMGRHKPENIVIEMARENQTTQKGQKNSRERMKRIEEGIKELGSQILKEHPVENTQLQNEKLYLYYLQNGRDMYVDQELDINRLSDYDVDHIVPQSFLKDDSIDNKVLTRSDKARGKSDNVPSEEVVKKMKNYWRQLLNAKLITQRKFDNLTKAERGGLSELDKAGFIKRQLVETRQITKHVAQILDSRMNTKYDENDKLIREVKVITLKSKLVSDFRKDFQFYKVREINNYHHAHDAYLNAVVGTALIKKYPKLESEFVYGDYKVYDVRKMIAKSEQEIGKATAKYFFYSNIMNFFKTEITLANGEIRKRPLIETNGETGEIVWDKGRDFATVRKVLSMPQVNIVKKTEVQTGGFSKESILPKRNSDKLIARKKDWDPKKYGGFDSPTVAYSVLVVAKVEKGKSKKLKSVKELLGITIMERSSFEKNPIDFLEAKGYKEVKKDLIIKLPKYSLFELENGRKRMLASAGELQKGNELALPSKYVNFLYLASHYEKLKGSPEDNEQKQLFVEQHKHYLDEIIEQISEFSKRVILADANLDKVLSAYNKHRDKPIREQAENIIHLFTLTNLGAPAAFKYFDTTIDRKRYTSTKEVLDATLIHQSITGLYETRIDLSQLGGDGGPAPGGGGSSGGVQEISDSRPMLHIYLNGRRFLGLLDTGADKTCIAGRDWPANWPIHQTESSLQGLGMACGVARSSQPLRWQHEDKSGIIHPFVIPTLPFTLWGRDIMKDIKVRLMTDSPDDSQDLMIGAIESNLFADQISWKSDQPVWLNQWPLKQEKLQALQQLVTEQLQLGHLEESNSPWNTPVFVIKKKSGKWRLLQDLRAVNATMHDMGALQPGLPSPVAVPKGWEIIIIDLQDCFFNIKLHPEDCKRFAFSVPSPNFKRPYQRFQWKVLPQGMKNSPTLCQKFVDKAILTVRDKYQDSYIVHYMDDILLAHPSRSIVDEILTSMIQALNKHGLVVSTEKIQKYDNLKYLGTHIQGDSVSYQKLQIRTDKLRTLNDFQKLLGNINWIRPFLKLTTGELKPLFEILNGDSNPISTRKLTPEACKALQLMNERLSTARVKRLDLSQPWSLCILKTEYTPTACLWQDGVVEWIHLPHISPKVITPYDIFCTQLIIKGRHRSKELFSKDPDYIVVPYTKVQFDLLLQEKEDWPISLLGFLGEVHFHLPKDPLLTFTLQTAIIFPHMTSTTPLEKGIVIFTDGSANGRSVTYIQGREPIIKENTQNTAQQAEIVAVITAFEEVSQPFNLYTDSKYVTGLFPEIETATLSPRTKIYTELKHLQRLIHKRQEKFYIGHIRGHTGLPGPLAQGNAYADSLTRILTAAGKRTADGSEFEKRTADGSEFESPKKKAKVE

SEQ ID NO: 7429 - protein, 2086 aa, synthetic construct
MPAAKRVKLDGGDKKYSIGLDIGTNSVGWAVITDEYKVPSKKFKVLGNTDRHSIKKNLIGALLFDSGETAEATRLKRTARRRYTRRKNRICYLQEIFSNEMAKVDDSFFHRLEESFLVEEDKKHERHPIFGNIVDEVAYHEKYPTIYHLRKKLVDSTDKADLRLIYLALAHMIKFRGHFLIEGDLNPDNSDVDKLFIQLVQTYNQLFEENPINASGVDAKAILSARLSKSRRLENLIAQLPGEKKNGLFGNLIALSLGLTPNFKSNFDLAEDAKLQLSKDTYDDDLDNLLAQIGDQYADLFLAAKNLSDAILLSDILRVNTEITKAPLSASMIKRYDEHHQDLTLLKALVRQQLPEKYKEIFFDQSKNGYAGYIDGGASQEEFYKFIKPILEKMDGTEELLVKLNREDLLRKQRTFDNGSIPHQIHLGELHAILRRQEDFYPFLKDNREKIEKILTFRIPYYVGPLARGNSRFAWMTRKSEETITPWNFEEVVDKGASAQSFIERMTNFDKNLPNEKVLPKHSLLYEYFTVYNELTKVKYVTEGMRKPAFLSGEQKKAIVDLLFKTNRKVTVKQLKEDYFKKIECFDSVEISGVEDRFNASLGTYHDLLKIIKDKDFLDNEENEDILEDIVLTLTLFEDREMIEERLKTYAHLFDDKVMKQLKRRRYTGWGRLSRKLINGIRDKQSGKTILDFLKSDGFANRNFMQLIHDDSLTFKEDIQKAQVSGQGDSLHEHIANLAGSPAIKKGILQTVKVVDELVKVMGRHKPENIVIEMARENQTTQKGQKNSRERMKRIEEGIKELGSQILKEHPVENTQLQNEKLYLYYLQNGRDMYVDQELDINRLSDYDVDHIVPQSFLKDDSIDNKVLTRSDKARGKSDNVPSEEVVKKMKNYWRQLLNAKLITQRKFDNLTKAERGGLSELDKAGFIKRQLVETRQITKHVAQILDSRMNTKYDENDKLIREVKVITLKSKLVSDFRKDFQFYKVREINNYHHAHDAYLNAVVGTALIKKYPKLESEFVYGDYKVYDVRKMIAKSEQEIGKATAKYFFYSNIMNFFKTEITLANGEIRKRPLIETNGETGEIVWDKGRDFATVRKVLSMPQVNIVKKTEVQTGGFSKESILPKRNSDKLIARKKDWDPKKYGGFDSPTVAYSVLVVAKVEKGKSKKLKSVKELLGITIMERSSFEKNPIDFLEAKGYKEVKKDLIIKLPKYSLFELENGRKRMLASAGELQKGNELALPSKYVNFLYLASHYEKLKGSPEDNEQKQLFVEQHKHYLDEIIEQISEFSKRVILADANLDKVLSAYNKHRDKPIREQAENIIHLFTLTNLGAPAAFKYFDTTIDRKRYTSTKEVLDATLIHQSITGLYETRIDLSQLGGDGGPAPGGGGSSGGLDDEYRLYSPLVKPDQNIQFWLEQFPQAWAETAGMGLAKQVPPQVIQLKASATPVSVRQYPLSKEAQEGIRPHVQRLIQQGILVPVQSPWNTPLLPVRKPGTNDYRPVQDLREVNKRVQDIHPTVPNPYNLLCALPPQRSWYTVLDLKDAFFCLRLHPTSQPLFAFEWRDPGTGRTGQLTWTRLPQGFKNSPTIFNEALHRDLANFRIQHPQVTLLQYVDDLLLAGATKQDCLEGTKALLLELSDLGYRASAKKAQICRREVTYLGYSLRDGQRWLTEARKKTVVQIPAPTTAKQVREFLGKAGFCRLFIPGFATLAAPLYPLTKPKGEFSWAPEHQKAFDAIKKALLSAPALALPDVTKPFTLYVDERKGVARGVLTQTLGPWRRPVAYLSKKLDPVASGWPVCLKAIAAVAILVKDADKLTLGQNITVIAPHALENIVRQPPDRWMTNARMTHYQSLLLTERVTFAPPAALNPATLLPEETDEPVTHDCHQLLIEETGVRKDLTDIPLTGEVLTWFTDGSSYVVEGKRMAGAAVVDGTRTIWASSLPEGTSAQKAELMALTQALRLAEGKSINIYTDSRYAFATAHVHGAIYKQRGWLTSAGREIKNKEEILSLLEALHLPKRLAIIHCPGHQKAKDPISRGNQMADRVAKQAAQGVNLLPAGKRTADGSEFEKRTADGSEFESPKKKAKVE

SEQ ID NO: 7430 - protein, 2086 aa, synthetic construct; identical to SEQ ID NO: 7429

SEQ ID NO: 7431 - protein, 2085 aa, synthetic construct
MPAAKRVKLDGGDKKYSIGLDIGTNSVGWAVITDEYKVPSKKFKVLGNTDRHSIKKNLIGALLFDSGETAEATRLKRTARRRYTRRKNRICYLQEIFSNEMAKVDDSFFHRLEESFLVEEDKKHERHPIFGNIVDEVAYHEKYPTIYHLRKKLVDSTDKADLRLIYLALAHMIKFRGHFLIEGDLNPDNSDVDKLFIQLVQTYNQLFEENPINASGVDAKAILSARLSKSRRLENLIAQLPGEKKNGLFGNLIALSLGLTPNFKSNFDLAEDAKLQLSKDTYDDDLDNLLAQIGDQYADLFLAAKNLSDAILLSDILRVNTEITKAPLSASMIKRYDEHHQDLTLLKALVRQQLPEKYKEIFFDQSKNGYAGYIDGGASQEEFYKFIKPILEKMDGTEELLVKLNREDLLRKQRTFDNGSIPHQIHLGELHAILRRQEDFYPFLKDNREKIEKILTFRIPYYVGPLARGNSRFAWMTRKSEETITPWNFEEVVDKGASAQSFIERMTNFDKNLPNEKVLPKHSLLYEYFTVYNELTKVKYVTEGMRKPAFLSGEQKKAIVDLLFKTNRKVTVKQLKEDYFKKIECFDSVEISGVEDRFNASLGTYHDLLKIIKDKDFLDNEENEDILEDIVLTLTLFEDREMIEERLKTYAHLFDDKVMKQLKRRRYTGWGRLSRKLINGIRDKQSGKTILDFLKSDGFANRNFMQLIHDDSLTFKEDIQKAQVSGQGDSLHEHIANLAGSPAIKKGILQTVKVVDELVKVMGRHKPENIVIEMARENQTTQKGQKNSRERMKRIEEGIKELGSQILKEHPVENTQLQNEKLYLYYLQNGRDMYVDQELDINRLSDYDVDHIVPQSFLKDDSIDNKVLTRSDKARGKSDNVPSEEVVKKMKNYWRQLLNAKLITQRKFDNLTKAERGGLSELDKAGFIKRQLVETRQITKHVAQILDSRMNTKYDENDKLIREVKVITLKSKLVSDFRKDFQFYKVREINNYHHAHDAYLNAVVGTALIKKYPKLESEFVYGDYKVYDVRKMIAKSEQEIGKATAKYFFYSNIMNFFKTEITLANGEIRKRPLIETNGETGEIVWDKGRDFATVRKVLSMPQVNIVKKTEVQTGGFSKESILPKRNSDKLIARKKDWDPKKYGGFDSPTVAYSVLVVAKVEKGKSKKLKSVKELLGITIMERSSFEKNPIDFLEAKGYKEVKKDLIIKLPKYSLFELENGRKRMLASAGELQKGNELALPSKYVNFLYLASHYEKLKGSPEDNEQKQLFVEQHKHYLDEIIEQISEFSKRVILADANLDKVLSAYNKHRDKPIREQAENIIHLFTLTNLGAPAAFKYFDTTIDRKRYTSTKEVLDATLIHQSITGLYETRIDLSQLGGDGGPAPGGGGSSGGIPWLMKKPLQLTTLVPLQEYEERLLKQTMLTGSYKEKLQSLFLKYDALWQHWENQVGHRRIKPHHIATGTVNPRPQKQYPINPKAKASIQTVINDLLKQGVLIQQNSIMNTPVYPVPKPDGKWRMVLDYREVNKTIPLIAAQNQHSAGILSSIFRGKYKTTLDLSNGFWAHSITPESYWLTAFTWLGQQYCWTRLPQGFLNSPALFTADVVDLLKEVPNVQVYVDDIYISHDDPREHLEQLEKVFSLLLNAGYVVSLKKSEIAQHEVEFLGFNITKEGRGLTETFKQKLLNITPPRDLKQLQSILGLLNFARNFIPNFSELVKPLYNIIATANGKYITWTTDNSQQLQNIISMLNSAENLEERNPEVRLIMKVNTSPSAGYIRFYNEFAKRPIMYLNYVYTKAEVKFTNTEKLLTTIHKGLIKALDLGMGQEILVYSPIVSMTKIQKTPLPERKALPIRWITWMSYLEDPRIQFHYDKTLPELQQVPTVTDDIIAKIKHPSEFSMVFYTDGSAIKHPNVNKSHNAGMGIAQVQFKPEFTVINTWSIPLGDHTAQLAEVAAVEFACKKALKIDGPVLIVTDSFYVAESVNKELPYWQSNGFFNNKKKPLKHVSKWKSIADCIQLKPDIIIIHEKGHQPTASTFHTEGNNLADKLATQGSYVVNAGKRTADGSEFEKRTADGSEFESPKKKAKVE

SEQ ID NO: 7432 - protein, 2085 aa, synthetic construct
MPAAKRVKLDGGDKKYSIGLDIGTNSVGWAVITDEYKVPSKKFKVLGNTDRHSIKKNLIGALLFDSGETAEATRLKRTARRRYTRRKNRICYLQEIFSNEMAKVDDSFFHRLEESFLVEEDKKHERHPIFGNIVDEVAYHEKYPTIYHLRKKLVDSTDKADLRLIYLALAHMIKFRGHFLIEGDLNPDNSDVDKLFIQLVQTYNQLFEENPINASGVDAKAILSARLSKSRRLENLIAQLPGEKKNGLFGNLIALSLGLTPNFKSNFDLAEDAKLQLSKDTYDDDLDNLLAQIGDQYADLFLAAKNLSDAILLSDILRVNTEITKAPLSASMIKRYDEHHQDLTLLKALVRQQLPEKYKEIFFDQSKNGYAGYIDGGASQEEFYKFIKPILEKMDGTEELLVKLNREDLLRKQRTFDNGSIPHQIHLGELHAILRRQEDFYPFLKDNREKIEKILTFRIPYYVGPLARGNSRFAWMTRKSEETITPWNFEEVVDKGASAQSFIERMTNFDKNLPNEKVLPKHSLLYEYFTVYNELTKVKYVTEGMRKPAFLSGEQKKAIVDLLFKTNRKVTVKQLKEDYFKKIECFDSVEISGVEDRFNASLGTYHDLLKIIKDKDFLDNEENEDILEDIVLTLTLFEDREMIEERLKTYAHLFDDKVMKQLKRRRYTGWGRLSRKLINGIRDKQSGKTILDFLKSDGFANRNFMQLIHDDSLTFKEDIQKAQVSGQGDSLHEHIANLAGSPAIKKGILQTVKVVDELVKVMGRHKPENIVIEMARENQTTQKGQKNSRERMKRIEEGIKELGSQILKEHPVENTQLQNEKLYLYYLQNGRDMYVDQELDINRLSDYDVDHIVPQSFLKDDSIDNKVLTRSDKARGKSDNVPSEEVVKKMKNYWRQLLNAKLITQRKFDNLTKAERGGLSELDKAGFIKRQLVETRQITKHVAQILDSRMNTKYDENDKLIREVKVITLKSKLVSDFRKDFQFYKVREINNYHHAHDAYLNAVVGTALIKKYPKLESEFVYGDYKVYDVRKMIAKSEQEIGKATAKYFFYSNIMNFFKTEITLANGEIRKRPLIETNGETGEIVWDKGRDFATVRKVLSMPQVNIVKKTEVQTGGFSKESILPKRNSDKLIARKKDWDPKKYGGFDSPTVAYSVLVVAKVEKGKSKKLKSVKELLGITIMERSSFEKNPIDFLEAKGYKEVKKDLIIKLPKYSLFELENGRKRMLASAGELQKGNELALPSKYVNFLYLASHYEKLKGSPEDNEQKQLFVEQHKHYLDEIIEQISEFSKRVILADANLDKVLSAYNKHRDKPIREQAENIIHLFTLTNLGAPAAFKYFDTTIDRKRYTSTKEVLDATLIHQSITGLYETRIDLSQLGGDGGPAPGGGGSSGGIPWLMKKPLQLTTLVPLQEYEERLLKQTMLTGSYKEKLQSLFLKYDALWQHWENQVGHRRIKPHHIATGTVNPRPQKQYPINPKAKASIQTVINDLLKQGVLIQQNSIMNTPVYPVPKPDGKWRMVLDYREVNKTIPLIAAQNQHSAGILSSIFRGKYKTTLDLSNGFWAHSITPESYWLTAFTWLGQQYCWTRLPQGFLNSPALFNADVVDLLKEVPNVQVYVDDIYISHDDPREHLEQLEKVFSLLLNAGYVVSLKKSEIAQHEVEFLGFNITKEGRGLTETFKQKLLNITPPRDLKQLQSILGLLNFARNFIPNFSELVKPLYNIIATAPGKYITWTTDNSQQLQNIISMLNSAENLEERNPEVRLIMKVNTSPSAGYIRFYNEFAKRPIMYLNYVYTKAEVKFTNTEKLLTTIHKGLIKALDLGMGQEILVYSPIVSMTKIQKTPLPERKALPIRWITWMSYLEDPRIQFHYDKTLPELQQVPTVTDDIIAKIKHPSEFSMVFYTDGSAIKHPNVNKSHNAGMGIAQVQFKPEFTVINTWSIPLGDHTAQLAEVAAVEFACKKALKIDGPVLIVTDSFYVAESVNKELPYWQSNGFFNNKKKPLKHVSKWKSIADCIQLKPDIIIIHEKGHQPTASTFHTEGNNLADKLATQGSYVVNAGKRTADGSEFEKRTADGSEFESPKKKAKVE

SEQ ID NO: 7433 - protein, 2085 aa, synthetic construct
MPAAKRVKLDGGDKKYSIGLDIGTNSVGWAVITDEYKVPSKKFKVLGNTDRHSIKKNLIGALLFDSGETAEATRLKRTARRRYTRRKNRICYLQEIFSNEMAKVDDSFFHRLEESFLVEEDKKHERHPIFGNIVDEVAYHEKYPTIYHLRKKLVDSTDKADLRLIYLALAHMIKFRGHFLIEGDLNPDNSDVDKLFIQLVQTYNQLFEENPINASGVDAKAILSARLSKSRRLENLIAQLPGEKKNGLFGNLIALSLGLTPNFKSNFDLAEDAKLQLSKDTYDDDLDNLLAQIGDQYADLFLAAKNLSDAILLSDILRVNTEITKAPLSASMIKRYDEHHQDLTLLKALVRQQLPEKYKEIFFDQSKNGYAGYIDGGASQEEFYKFIKPILEKMDGTEELLVKLNREDLLRKQRTFDNGSIPHQIHLGELHAILRRQEDFYPFLKDNREKIEKILTFRIPYYVGPLARGNSRFAWMTRKSEETITPWNFEEVVDKGASAQSFIERMTNFDKNLPNEKVLPKHSLLYEYFTVYNELTKVKYVTEGMRKPAFLSGEQKKAIVDLLFKTNRKVTVKQLKEDYFKKIECFDSVEISGVEDRFNASLGTYHDLLKIIKDKDFLDNEENEDILEDIVLTLTLFEDREMIEERLKTYAHLFDDKVMKQLKRRRYTGWGRLSRKLINGIRDKQSGKTILDFLKSDGFANRNFMQLIHDDSLTFKEDIQKAQVSGQGDSLHEHIANLAGSPAIKKGILQTVKVVDELVKVMGRHKPENIVIEMARENQTTQKGQKNSRERMKRIEEGIKELGSQILKEHPVENTQLQNEKLYLYYLQNGRDMYVDQELDINRLSDYDVDHIVPQSFLKDDSIDNKVLTRSDKARGKSDNVPSEEVVKKMKNYWRQLLNAKLITQRKFDNLTKAERGGLSELDKAGFIKRQLVETRQITKHVAQILDSRMNTKYDENDKLIREVKVITLKSKLVSDFRKDFQFYKVREINNYHHAHDAYLNAVVGTALIKKYPKLESEFVYGDYKVYDVRKMIAKSEQEIGKATAKYFFYSNIMNFFKTEITLANGEIRKRPLIETNGETGEIVWDKGRDFATVRKVLSMPQVNIVKKTEVQTGGFSKESILPKRNSDKLIARKKDWDPKKYGGFDSPTVAYSVLVVAKVEKGKSKKLKSVKELLGITIMERSSFEKNPIDFLEAKGYKEVKKDLIIKLPKYSLFELENGRKRMLASAGELQKGNELALPSKYVNFLYLASHYEKLKGSPEDNEQKQLFVEQHKHYLDEIIEQISEFSKRVILADANLDKVLSAYNKHRDKPIREQAENIIHLFTLTNLGAPAAFKYFDTTIDRKRYTSTKEVLDATLIHQSITGLYETRIDLSQLGGDGGPAPGGGGSSGGIPWLMKKPLQLTTLVPLQEYEERLLKQTMLTGSYKEKLQSLFLKYDALWQHWENQVGHRRIKPHHIATGTVNPRPQKQYPINPKAKASIQTVINDLLKQGVLIQQNSIMNTPVYPVPKPDGKWRMVLDYREVNKTIPLIAAQNQHSAGILSSIFRGKYKTTLDLSNGFWAHSITPESYWLTAFTWLGQQYCWTRLPQGFLNSPALFNADVVDLLKEVPNVQVYVDDIYISHDDPREHLEQLEKVFSLLLNAGYVVSLKKSEIAQHEVEFLGFNITKEGRGLTETFKQKLLNITPPRDLKQLQSILGKLNFARNFIPNFSELVKPLYNIIATAPGKYITWTTDNSQQLQNIISMLNSAENLEERNPEVRLIMKVNTSPSAGYIRFYNEFAKRPIMYLNYVYTKAEVKFTNTEKLLTTIHKGLIKALDLGMGQEILVYSPIVSMTKIQKTPLPERKALPIRWITWMSYLEDPRIQFHYDKTLPELQQVPTVTDDIIAKIKHPSEFSMVFYTDGSAIKHPNVNKSHNAGMGIAQVQFKPEFTVINTWSIPLGDHTAQLAEVAAVEFACKKALKIDGPVLIVTDSFYVAESVNKELPYWQSNGFFNNKKKPLKHVSKWKSIADCIQLKPDIIIIHEKGHQPTASTFHTEGNNLADKLATQGSYVVNAGKRTADGSEFEKRTADGSEFESPKKKAKVE

SEQ ID NO: 7434 - protein, 2174 aa, synthetic construct
MPAAKRVKLDGGDKKYSIGLDIGTNSVGWAVITDEYKVPSKKFKVLGNTDRHSIKKNLIGALLFDSGETAEATRLKRTARRRYTRRKNRICYLQEIFSNEMAKVDDSFFHRLEESFLVEEDKKHERHPIFGNIVDEVAYHEKYPTIYHLRKKLVDSTDKADLRLIYLALAHMIKFRGHFLIEGDLNPDNSDVDKLFIQLVQTYNQLFEENPINASGVDAKAILSARLSKSRRLENLIAQLPGEKKNGLFGNLIALSLGLTPNFKSNFDLAEDAKLQLSKDTYDDDLDNLLAQIGDQYADLFLAAKNLSDAILLSDILRVNTEITKAPLSASMIKRYDEHHQDLTLLKALVRQQLPEKYKEIFFDQSKNGYAGYIDGGASQEEFYKFIKPILEKMDGTEELLVKLNREDLLRKQRTFDNGSIPHQIHLGELHAILRRQEDFYPFLKDNREKIEKILTFRIPYYVGPLARGNSRFAWMTRKSEETITPWNFEEVVDKGASAQSFIERMTNFDKNLPNEKVLPKHSLLYEYFTVYNELTKVKYVTEGMRKPAFLSGEQKKAIVDLLFKTNRKVTVKQLKEDYFKKIECFDSVEISGVEDRFNASLGTYHDLLKIIKDKDFLDNEENEDILEDIVLTLTLFEDREMIEERLKTYAHLFDDKVMKQLKRRRYTGWGRLSRKLINGIRDKQSGKTILDFLKSDGFANRNFMQLIHDDSLTFKEDIQKAQVSGQGDSLHEHIANLAGSPAIKKGILQTVKVVDELVKVMGRHKPENIVIEMARENQTTQKGQKNSRERMKRIEEGIKELGSQILKEHPVENTQLQNEKLYLYYLQNGRDMYVDQELDINRLSDYDVDHIVPQSFLKDDSIDNKVLTRSDKARGKSDNVPSEEVVKKMKNYWRQLLNAKLITQRKFDNLTKAERGGLSELDKAGFIKRQLVETRQITKHVAQILDSRMNTKYDENDKLIREVKVITLKSKLVSDFRKDFQFYKVREINNYHHAHDAYLNAVVGTALIKKYPKLESEFVYGDYKVYDVRKMIAKSEQEIGKATAKYFFYSNIMNFFKTEITLANGEIRKRPLIETNGETGEIVWDKGRDFATVRKVLSMPQVNIVKKTEVQTGGFSKESILPKRNSDKLIARKKDWDPKKYGGFDSPTVAYSVLVVAKVEKGKSKKLKSVKELLGITIMERSSFEKNPIDFLEAKGYKEVKKDLIIKLPKYSLFELENGRKRMLASAGELQKGNELALPSKYVNFLYLASHYEKLKGSPEDNEQKQLFVEQHKHYLDEIIEQISEFSKRVILADANLDKVLSAYNKHRDKPIREQAENIIHLFTLTNLGAPAAFKYFDTTIDRKRYTSTKEVLDATLIHQSITGLYETRIDLSQLGGDGGPAPGGGGSSGGMDPLQLLQPLEAEIKGTKLKAHWNSGATITCVPQAFLEEEVPIKNIWIKTIHGEKEQPVYYLTFKIQGRKVEAEVISSPYDYILVSPSDIPWLMKKPLQLTTLVPLQEYEERLLKQTMLTGSYKEKLQSLFLKYDALWQHWENQVGHRRIKPHHIATGTVNPRPQKQYPINPKAKASIQTVINDLLKQGVLIQQNSIMNTPVYPVPKPDGKWRMVLDYREVNKTIPLIAAQNQHSAGILSSIFRGKYKTTLDLSNGFWAHSITPESYWLTAFTWLGQQYCWTRLPQGFLNSPALFNADVVDLLKEVPNVQVYVDDIYISHDDPREHLEQLEKVFSLLLNAGYVVSLKKSEIAQHEVEFLGFNITKEGRGLTETFKQKLLNITPPRDLKQLQSILGKLNFARNFIPNFSELVKPLYNIIATAPGKYITWTTDNSQQLQNIISMLNSAENLEERNPEVRLIMKVNTSPSAGYIRFYNEFAKRPIMYLNYVYTKAEVKFTNTEKLLTTIHKGLIKALDLGMGQEILVYSPIVSMTKIQKTPLPERKALPIRWITWMSYLEDPRIQFHYDKTLPELQQVPTVTDDIIAKIKHPSEFSMVFYTDGSAIKHPNVNKSHNAGMGIAQVQFKPEFTVINTWSIPLGDHTAQLAEVAAVEFACKKALKIDGPVLIVTDSFYVAESVNKELPYWQSNGFFNNKKKPLKHVSKWKSIADCIQLKPDIIIIHEKGHQPTASTFHTEGNNLADKLATQGSYVVNAGKRTADGSEFEKRTADGSEFESPKKKAKVE

SEQ ID NO: 7435 - protein, 2092 aa, synthetic construct
MPAAKRVKLDGGDKKYSIGLDIGTNSVGWAVITDEYKVPSKKFKVLGNTDRHSIKKNLIGALLFDSGETAEATRLKRTARRRYTRRKNRICYLQEIFSNEMAKVDDSFFHRLEESFLVEEDKKHERHPIFGNIVDEVAYHEKYPTIYHLRKKLVDSTDKADLRLIYLALAHMIKFRGHFLIEGDLNPDNSDVDKLFIQLVQTYNQLFEENPINASGVDAKAILSARLSKSRRLENLIAQLPGEKKNGLFGNLIALSLGLTPNFKSNFDLAEDAKLQLSKDTYDDDLDNLLAQIGDQYADLFLAAKNLSDAILLSDILRVNTEITKAPLSASMIKRYDEHHQDLTLLKALVRQQLPEKYKEIFFDQSKNGYAGYIDGGASQEEFYKFIKPILEKMDGTEELLVKLNREDLLRKQRTFDNGSIPHQIHLGELHAILRRQEDFYPFLKDNREKIEKILTFRIPYYVGPLARGNSRFAWMTRKSEETITPWNFEEVVDKGASAQSFIERMTNFDKNLPNEKVLPKHSLLYEYFTVYNELTKVKYVTEGMRKPAFLSGEQKKAIVDLLFKTNRKVTVKQLKEDYFKKIECFDSVEISGVEDRFNASLGTYHDLLKIIKDKDFLDNEENEDILEDIVLTLTLFEDREMIEERLKTYAHLFDDKVMKQLKRRRYTGWGRLSRKLINGIRDKQSGKTILDFLKSDGFANRNFMQLIHDDSLTFKEDIQKAQVSGQGDSLHEHIANLAGSPAIKKGILQTVKVVDELVKVMGRHKPENIVIEMARENQTTQKGQKNSRERMKRIEEGIKELGSQILKEHPVENTQLQNEKLYLYYLQNGRDMYVDQELDINRLSDYDVDHIVPQSFLKDDSIDNKVLTRSDKARGKSDNVPSEEVVKKMKNYWRQLLNAKLITQRKFDNLTKAERGGLSELDKAGFIKRQLVETRQITKHVAQILDSRMNTKYDENDKLIREVKVITLKSKLVSDFRKDFQFYKVREINNYHHAHDAYLNAVVGTALIKKYPKLESEFVYGDYKVYDVRKMIAKSEQEIGKATAKYFFYSNIMNFFKTEITLANGEIRKRPLIETNGETGEIVWDKGRDFATVRKVLSMPQVNIVKKTEVQTGGFSKESILPKRNSDKLIARKKDWDPKKYGGFDSPTVAYSVLVVAKVEKGKSKKLKSVKELLGITIMERSSFEKNPIDFLEAKGYKEVKKDLIIKLPKYSLFELENGRKRMLASAGELQKGNELALPSKYVNFLYLASHYEKLKGSPEDNEQKQLFVEQHKHYLDEIIEQISEFSKRVILADANLDKVLSAYNKHRDKPIREQAENIIHLFTLTNLGAPAAFKYFDTTIDRKRYTSTKEVLDATLIHQSITGLYETRIDLSQLGGDGGPAPGGGGSSGGVLNLEEEYRLHEKPVPSSIDPSWLQLFPTVWAERAGMGLANQVPPVVVELRSGASPVAVRQYPMSKEAREGIRPHIQRFLDLGVLVPCQSPWNTPLLPVKKPGTNDYRPVQDLREINKRVQDIHPTVPNPYNLLSSLPPSHTWYSVLDLKDAFFCLKLHPNSQPLFAFEWRDPEKGNTGQLTWTRLPQGFKNSPTLFNEALHRDLAPFRALNPQVVLLQYVDDLLVAAPTYRDCKEGTQKLLQELSKLGYRVSAKKAQLCQKEVTYLGYLLKEGKRWLTPARKATVMKIPPPTTPRQVREFLGTAGFCRLWIPGFASLAAPLYPLTKPSIPFIWTEEHQKAFDRIKEALLSAPALALPDLTKPFTLYVDERAGVARGVLTQTLGPWRRPVAYLSKKLDPVASGWPTCLKAVAAVALLLKDADKLTLGQNVTVIASHSLESIVRQPPDRWMTNARMTHYQSLLLNERVSFAPPAVLNPATLLPVESEATPVHRCSEILAEETGTRRDLKDQPLPGVPAWYTDGSSFIAEGKRRAGAAIVDGKRTVWASSLPEGTSAQKAELVALTQALRLAEGKDINIYTDSRYAFATAHIHGAIYKQRGWLTSAGKDIKNKEEILALLEAIHLPKRVAIIHCPGHQKGNDPVATGNRRADEAAKQAALSTRVLAETTKPAGKRTADGSEFEKRTADGSEFESPKKKAKVE

SEQ ID NO: 7436 - protein, 2094 aa, synthetic construct
MPAAKRVKLDGGDKKYSIGLDIGTNSVGWAVITDEYKVPSKKFKVLGNTDRHSIKKNLIGALLFDSGETAEATRLKRTARRRYTRRKNRICYLQEIFSNEMAKVDDSFFHRLEESFLVEEDKKHERHPIFGNIVDEVAYHEKYPTIYHLRKKLVDSTDKADLRLIYLALAHMIKFRGHFLIEGDLNPDNSDVDKLFIQLVQTYNQLFEENPINASGVDAKAILSARLSKSRRLENLIAQLPGEKKNGLFGNLIALSLGLTPNFKSNFDLAEDAKLQLSKDTYDDDLDNLLAQIGDQYADLFLAAKNLSDAILLSDILRVNTEITKAPLSASMIKRYDEHHQDLTLLKALVRQQLPEKYKEIFFDQSKNGYAGYIDGGASQEEFYKFIKPILEKMDGTEELLVKLNREDLLRKQRTFDNGSIPHQIHLGELHAILRRQEDFYPFLKDNREKIEKILTFRIPYYVGPLARGNSRFAWMTRKSEETITPWNFEEVVDKGASAQSFIERMTNFDKNLPNEKVLPKHSLLYEYFTVYNELTKVKYVTEGMRKPAFLSGEQKKAIVDLLFKTNRKVTVKQLKEDYFKKIECFDSVEISGVEDRFNASLGTYHDLLKIIKDKDFLDNEENEDILEDIVLTLTLFEDREMIEERLKTYAHLFDDKVMKQLKRRRYTGWGRLSRKLINGIRDKQSGKTILDFLKSDGFANRNFMQLIHDDSLTFKEDIQKAQVSGQGDSLHEHIANLAGSPAIKKGILQTVKVVDELVKVMGRHKPENIVIEMARENQTTQKGQKNSRERMKRIEEGIKELGSQILKEHPVENTQLQNEKLYLYYLQNGRDMYVDQELDINRLSDYDVDHIVPQSFLKDDSIDNKVLTRSDKARGKSDNVPSEEVVKKMKNYWRQLLNAKLITQRKFDNLTKAERGGLSELDKAGFIKRQLVETRQITKHVAQILDSRMNTKYDENDKLIREVKVITLKSKLVSDFRKDFQFYKVREINNYHHAHDAYLNAVVGTALIKKYPKLESEFVYGDYKVYDVRKMIAKSEQEIGKATAKYFFYSNIMNFFKTEITLANGEIRKRPLIETNGETGEIVWDKGRDFATVRKVLSMPQVNIVKKTEVQTGGFSKESILPKRNSDKLIARKKDWDPKKYGGFDSPTVAYSVLVVAKVEKGKSKKLKSVKELLGITIMERSSFEKNPIDFLEAKGYKEVKKDLIIKLPKYSLFELENGRKRMLASAGELQKGNELALPSKYVNFLYLASHYEKLKGSPEDNEQKQLFVEQHKHYLDEIIEQISEFSKRVILADANLDKVLSAYNKHRDKPIREQAENIIHLFTLTNLGAPAAFKYFDTTIDRKRYTSTKEVLDATLIHQSITGLYETRIDLSQLGGDGGPAPGGGGSSGGTLNIEDEYRLHETSKEPDVPLGSTWLSDFPQAWAETGGMGLAVRQAPLIIPLKATSTPVSIKQYPMSQEARLGIKPHIQRLLDQGILVPCQSPWNTPLLPVKKPGTNDYRPVQDLREVNKRVEDIHPTVPNPYNLLSGLPPSHQWYTVLDLKDAFFCLRLHPTSQPLFAFEWRDPEMGISGQLTWTRLPQGFKNSPTLFNEALHRDLADFRIQHPDLILLQYVDDLLLAATSEQDCQRGTRALLQTLGNLGYRASAKKAQICQKQVKYLGYLLKEGQRWLTEARKETVMGQPTPKTPRQLREFLGTAGFCRLWIPGFAEMAAPLYPLTKPGTLFNWGPDQQKAYQEIKQALLTAPALGLPDLTKPFELFVDEKQGYAKGVLTQKLGPWRRPVAYLSKKLDPVAAGWPPCLRMVAAIAVLTKDAGKLTMGQPLVILAPHAVEALVKQPPDRWLSNARMTHYQAMLLDTDRVQFGPVVALNPATLLPLPEKEAPHDCLEILAETHGTRPDLTDQPIPDADYTWYTDGSSFLQEGQRRAGAAVTTETEVIWARALPAGTSAQRAELIALTQALKMAEGKKLNVYTDSRYAFATAHVHGEIYRRRGWLTSEGREIKNKNEILALLKALFLPKRLSIIHCPGHQKGNSAEARGNRMADQAAREAAMKAVLETSTLLAGKRTADGSEFEKRTADGSEFESPKKKAKVE

SEQ ID NO: 7437 - protein, 2094 aa, synthetic construct
MPAAKRVKLDGGDKKYSIGLDIGTNSVGWAVITDEYKVPSKKFKVLGNTDRHSIKKNLIGALLFDSGETAEATRLKRTARRRYTRRKNRICYLQEIFSNEMAKVDDSFFHRLEESFLVEEDKKHERHPIFGNIVDEVAYHEKYPTIYHLRKKLVDSTDKADLRLIYLALAHMIKFRGHFLIEGDLNPDNSDVDKLFIQLVQTYNQLFEENPINASGVDAKAILSARLSKSRRLENLIAQLPGEKKNGLFGNLIALSLGLTPNFKSNFDLAEDAKLQLSKDTYDDDLDNLLAQIGDQYADLFLAAKNLSDAILLSDILRVNTEITKAPLSASMIKRYDEHHQDLTLLKALVRQQLPEKYKEIFFDQSKNGYAGYIDGGASQEEFYKFIKPILEKMDGTEELLVKLNREDLLRKQRTFDNGSIPHQIHLGELHAILRRQEDFYPFLKDNREKIEKILTFRIPYYVGPLARGNSRFAWMTRKSEETITPWNFEEVVDKGASAQSFIERMTNFDKNLPNEKVLPKHSLLYEYFTVYNELTKVKYVTEGMRKPAFLSGEQKKAIVDLLFKTNRKVTVKQLKEDYFKKIECFDSVEISGVEDRFNASLGTYHDLLKIIKDKDFLDNEENEDILEDIVLTLTLFEDREMIEERLKTYAHLFDDKVMKQLKRRRYTGWGRLSRKLINGIRDKQSGKTILDFLKSDGFANRNFMQLIHDDSLTFKEDIQKAQVSGQGDSLHEHIANLAGSPAIKKGILQTVKVVDELVKVMGRHKPENIVIEMARENQTTQKGQKNSRERMKRIEEGIKELGSQILKEHPVENTQLQNEKLYLYYLQNGRDMYVDQELDINRLSDYDVDHIVPQSFLKDDSIDNKVLTRSDKARGKSDNVPSEEVVKKMKNYWRQLLNAKLITQRKFDNLTKAERGGLSELDKAGFIKRQLVETRQITKHVAQILDSRMNTKYDENDKLIREVKVITLKSKLVSDFRKDFQFYKVREINNYHHAHDAYLNAVVGTALIKKYPKLESEFVYGDYKVYDVRKMIAKSEQEIGKATAKYFFYSNIMNFFKTEITLANGEIRKRPLIETNGETGEIVWDKGRDFATVRKVLSMPQVNIVKKTEVQTGGFSKESILPKRNSDKLIARKKDWDPKKYGGFDSPTVAYSVLVVAKVEKGKSKKLKSVKELLGITIMERSSFEKNPIDFLEAKGYKEVKKDLIIKLPKYSLFELENGRKRMLASAGELQKGNELALPSKYVNFLYLASHYEKLKGSPEDNEQKQLFVEQHKHYLDEIIEQISEFSKRVILADANLDKVLSAYNKHRDKPIREQAENIIHLFTLTNLGAPAAFKYFDTTIDRKRYTSTKEVLDATLIHQSITGLYETRIDLSQLGGDGGPAPGGGGSSGGTLNIEDEYRLHETSKEPDVPLGSTWLSDFPQAWAETGGMGLAVRQAPLIIPLKATSTPVSIKQYPMSQEARLGIKPHIQRLLDQGILVPCQSPWNTPLLPVKKPGTNDYRPVQDLREVNKRVEDIHPTVPNPYNLLSGLPPSHQWYTVLDLKDAFFCLRLHPTSQPLFAFEWRDPEMGISGQLTWTRLPQGFKNSPTLFNEALHRDLADFRIQHPDLILLQYVDDLLLAATSEQDCQRGTRALLQTLGNLGYRASAKKAQICQKQVKYLGYLLKEGQRWLTEARKETVMGQPTPKTPRQLREFLGKAGFCRLFIPGFAEMAAPLYPLTKPGTLFNWGPDQQKAYQEIKQALLTAPALGLPDLTKPFELFVDEKQGYAKGVLTQKLGPWRRPVAYLSKKLDPVAAGWPPCLRMVAAIAVLTKDAGKLTMGQPLVILAPHAVEALVKQPPDRWLSNARMTHYQAMLLDTDRVQFGPVVALNPATLLPLPEKEAPHDCLEILAETHGTRPDLTDQPIPDADYTWYTDGSSFLQEGQRRAGAAVTTETEVIWARALPAGTSAQRAELIALTQALKMAEGKKLNVYTDSRYAFATAHVHGEIYRRRGWLTSEGREIKNKNEILALLKALFLPKRLSIIHCPGHQKGNSAEARGNRMADQAAREAAMKAVLETSTLLAGKRTADGSEFEKRTADGSEFESPKKKAKVE

SEQ ID NO: 7438 - protein, 2096 aa, synthetic construct
MPAAKRVKLDGGDKKYSIGLDIGTNSVGWAVITDEYKVPSKKFKVLGNTDRHSIKKNLIGALLFDSGETAEATRLKRTARRRYTRRKNRICYLQEIFSNEMAKVDDSFFHRLEESFLVEEDKKHERHPIFGNIVDEVAYHEKYPTIYHLRKKLVDSTDKADLRLIYLALAHMIKFRGHFLIEGDLNPDNSDVDKLFIQLVQTYNQLFEENPINASGVDAKAILSARLSKSRRLENLIAQLPGEKKNGLFGNLIALSLGLTPNFKSNFDLAEDAKLQLSKDTYDDDLDNLLAQIGDQYADLFLAAKNLSDAILLSDILRVNTEITKAPLSASMIKRYDEHHQDLTLLKALVRQQLPEKYKEIFFDQSKNGYAGYIDGGASQEEFYKFIKPILEKMDGTEELLVKLNREDLLRKQRTFDNGSIPHQIHLGELHAILRRQEDFYPFLKDNREKIEKILTFRIPYYVGPLARGNSRFAWMTRKSEETITPWNFEEVVDKGASAQSFIERMTNFDKNLPNEKVLPKHSLLYEYFTVYNELTKVKYVTEGMRKPAFLSGEQKKAIVDLLFKTNRKVTVKQLKEDYFKKIECFDSVEISGVEDRFNASLGTYHDLLKIIKDKDFLDNEENEDILEDIVLTLTLFEDREMIEERLKTYAHLFDDKVMKQLKRRRYTGWGRLSRKLINGIRDKQSGKTILDFLKSDGFANRNFMQLIHDDSLTFKEDIQKAQVSGQGDSLHEHIANLAGSPAIKKGILQTVKVVDELVKVMGRHKPENIVIEMARENQTTQKGQKNSRERMKRIEEGIKELGSQILKEHPVENTQLQNEKLYLYYLQNGRDMYVDQELDINRLSDYDVDHIVPQSFLKDDSIDNKVLTRSDKARGKSDNVPSEEVVKKMKNYWRQLLNAKLITQRKFDNLTKAERGGLSELDKAGFIKRQLVETRQITKHVAQILDSRMNTKYDENDKLIREVKVITLKSKLVSDFRKDFQFYKVREINNYHHAHDAYLNAVVGTALIKKYPKLESEFVYGDYKVYDVRKMIAKSEQEIGKATAKYFFYSNIMNFFKTEITLANGEIRKRPLIETNGETGEIVWDKGRDFATVRKVLSMPQVNIVKKTEVQTGGFSKESILPKRNSDKLIARKKDWDPKKYGGFDSPTVAYSVLVVAKVEKGKSKKLKSVKELLGITIMERSSFEKNPIDFLEAKGYKEVKKDLIIKLPKYSLFELENGRKRMLASAGELQKGNELALPSKYVNFLYLASHYEKLKGSPEDNEQKQLFVEQHKHYLDEIIEQISEFSKRVILADANLDKVLSAYNKHRDKPIREQAENIIHLFTLTNLGAPAAFKYFDTTIDRKRYTSTKEVLDATLIHQSITGLYETRIDLSQLGGDGGPAPGSSGGGGGTAPLEEEYRLFLEAPIQNVTLLEQWKREIPKVWAEINPPGLASTQAPIHVQLLSTALPVRVRQYPITLEAKRSLRETIRKFRAAGILRPVHSPWNTPLLPVRKSGTSEYRMVQDLREVNKRVETIHPTVPNPYTLLSLLPPDRIWYSVLDLKDAFFCIPLAPESQLIFAFEWADAEEGESGQLTWTRLPQGFKNSPTLFNEALNRDLQGFRLDHPSVSLLQYVDDLLIAADTQAACLSATRDLLMTLAELGYRVSGKKAQLCQEEVTYLGFKIHKGSRSLSNSRTQAILQIPVPKTKRQVREFLGKIGYCRLFIPGFAELAQPLYAATRPGNDPLVWGEKEEEAFQSLKLALTQPPALALPSLDKPFQLFVEETSGAAKGVLTQALGPWKRPVAYLSKRLDPVAAGWPRCLRAIAAAALLTREASKLTFGQDIEITSSHNLESLLRSPPDKWLTNARITQYQVLLLDPPRVRFKQTAALNPATLLPETDDTLPIHHCLDTLDSLTSTRPDLTDQPLAQAEATLFTDGSSYIRDGKRYAGAAVVTLDSVIWAEPLPIGTSAQKAELIALTKALEWSKDKSVNIYTDSRYAFATLHVHGMIYRERGWLTAGGKAIKNAPEILALLTAVWLPKRVAVMHCKGHQKDDAPTSTGNRRADEVAREVAIRPLSTQATISAGKRTADGSEFEKRTADGSEFESPKKKAKVE

SEQ ID NO: 7439 - protein, 2171 aa, synthetic construct
MPAAKRVKLDGGDKKYSIGLDIGTNSVGWAVITDEYKVPSKKFKVLGNTDRHSIKKNLIGALLFDSGETAEATRLKRTARRRYTRRKNRICYLQEIFSNEMAKVDDSFFHRLEESFLVEEDKKHERHPIFGNIVDEVAYHEKYPTIYHLRKKLVDSTDKADLRLIYLALAHMIKFRGHFLIEGDLNPDNSDVDKLFIQLVQTYNQLFEENPINASGVDAKAILSARLSKSRRLENLIAQLPGEKKNGLFGNLIALSLGLTPNFKSNFDLAEDAKLQLSKDTYDDDLDNLLAQIGDQYADLFLAAKNLSDAILLSDILRVNTEITKAPLSASMIKRYDEHHQDLTLLKALVRQQLPEKYKEIFFDQSKNGYAGYIDGGASQEEFYKFIKPILEKMDGTEELLVKLNREDLLRKQRTFDNGSIPHQIHLGELHAILRRQEDFYPFLKDNREKIEKILTFRIPYYVGPLARGNSRFAWMTRKSEETITPWNFEEVVDKGASAQSFIERMTNFDKNLPNEKVLPKHSLLYEYFTVYNELTKVKYVTEGMRKPAFLSGEQKKAIVDLLFKTNRKVTVKQLKEDYFKKIECFDSVEISGVEDRFNASLGTYHDLLKIIKDKDFLDNEENEDILEDIVLTLTLFEDREMIEERLKTYAHLFDDKVMKQLKRRRYTGWGRLSRKLINGIRDKQSGKTILDFLKSDGFANRNFMQLIHDDSLTFKEDIQKAQVSGQGDSLHEHIANLAGSPAIKKGILQTVKVVDELVKVMGRHKPENIVIEMARENQTTQKGQKNSRERMKRIEEGIKELGSQILKEHPVENTQLQNEKLYLYYLQNGRDMYVDQELDINRLSDYDVDHIVPQSFLKDDSIDNKVLTRSDKARGKSDNVPSEEVVKKMKNYWRQLLNAKLITQRKFDNLTKAERGGLSELDKAGFIKRQLVETRQITKHVAQILDSRMNTKYDENDKLIREVKVITLKSKLVSDFRKDFQFYKVREINNYHHAHDAYLNAVVGTALIKKYPKLESEFVYGDYKVYDVRKMIAKSEQEIGKATAKYFFYSNIMNFFKTEITLANGEIRKRPLIETNGETGEIVWDKGRDFATVRKVLSMPQVNIVKKTEVQTGGFSKESILPKRNSDKLIARKKDWDPKKYGGFDSPTVAYSVLVVAKVEKGKSKKLKSVKELLGITIMERSSFEKNPIDFLEAKGYKEVKKDLIIKLPKYSLFELENGRKRMLASAGELQKGNELALPSKYVNFLYLASHYEKLKGSPEDNEQKQLFVEQHKHYLDEIIEQISEFSKRVILADANLDKVLSAYNKHRDKPIREQAENIIHLFTLTNLGAPAAFKYFDTTIDRKRYTSTKEVLDATLIHQSITGLYETRIDLSQLGGDGGPAPGSSGGGGGMDLLKPLTVERKGVKIKGYWNSQADITCVPKDLLQGEEPVRQQNVTTIHGTQEGDVYYVNLKIDGRRINTEVIGTTLDYAIITPGDVPWILKKPLELTIKLDLEEQQGTLLNNSILSKKGKEELKQLFEKYSALWQSWENQVGHRRIRPHKIATGTVKPTPQKQYHINPKAKPDIQIVINDLLKQGVLIQKESTMNTPVYPVPKPNGRWRMVLDYRAVNKVTPLIAVQNQHSYGILGSLFKGRYKTTIDLSNGFWAHPIVPEDYWITAFTWQGKQYCWTVLPQGFLNSPGLFTGDVVDLLQGIPNVEVYVDDVYISHDSEKEHLEYLDILFNRLKEAGYIISLKKSNIANSIVDFLGFQITNEGRGLTDTFKEKLENITAPTTLKQLQSILGLLNFARNFIPDFTELIAPLYALIPKSTKNYVPWQIEHSTTLETLITKLNGAEYLQGRKGDKTLIMKVNASYTTGYIRYYNEGEKKPISYVSIVFSKTELKFTELEKLLTTVHKGLLKALDLSMGQNIHVYSPIVSMQNIQKTPQTAKKALASRWLSWLSYLEDPRIRFFYDPQMPALKDLPAVDTGKDNKKHPSNFQHIFYTDGSAITSPTKEGHLNAGMGIVYFINKDGNLQKQQEWSISLGNHTAQFAEIAAFEFALKKCLPLGGNILVVTDSNYVAKAYNEELDVWASNGFVNNRKKPLKHISKWKSVADLKRLRPDVVVTHEPGHQKLDSSPHAYGNNLADQLATQASFKVHAGKRTADGSEFEKRTADGSEFESPKKKAKVE

SEQ ID NO: 7440 - protein, 2174 aa, synthetic construct
MPAAKRVKLDGGDKKYSIGLDIGTNSVGWAVITDEYKVPSKKFKVLGNTDRHSIKKNLIGALLFDSGETAEATRLKRTARRRYTRRKNRICYLQEIFSNEMAKVDDSFFHRLEESFLVEEDKKHERHPIFGNIVDEVAYHEKYPTIYHLRKKLVDSTDKADLRLIYLALAHMIKFRGHFLIEGDLNPDNSDVDKLFIQLVQTYNQLFEENPINASGVDAKAILSARLSKSRRLENLIAQLPGEKKNGLFGNLIALSLGLTPNFKSNFDLAEDAKLQLSKDTYDDDLDNLLAQIGDQYADLFLAAKNLSDAILLSDILRVNTEITKAPLSASMIKRYDEHHQDLTLLKALVRQQLPEKYKEIFFDQSKNGYAGYIDGGASQEEFYKFIKPILEKMDGTEELLVKLNREDLLRKQRTFDNGSIPHQIHLGELHAILRRQEDFYPFLKDNREKIEKILTFRIPYYVGPLARGNSRFAWMTRKSEETITPWNFEEVVDKGASAQSFIERMTNFDKNLPNEKVLPKHSLLYEYFTVYNELTKVKYVTEGMRKPAFLSGEQKKAIVDLLFKTNRKVTVKQLKEDYFKKIECFDSVEISGVEDRFNASLGTYHDLLKIIKDKDFLDNEENEDILEDIVLTLTLFEDREMIEERLKTYAHLFDDKVMKQLKRRRYTGWGRLSRKLINGIRDKQSGKTILDFLKSDGFANRNFMQLIHDDSLTFKEDIQKAQVSGQGDSLHEHIANLAGSPAIKKGILQTVKVVDELVKVMGRHKPENIVIEMARENQTTQKGQKNSRERMKRIEEGIKELGSQILKEHPVENTQLQNEKLYLYYLQNGRDMYVDQELDINRLSDYDVDHIVPQSFLKDDSIDNKVLTRSDKARGKSDNVPSEEVVKKMKNYWRQLLNAKLITQRKFDNLTKAERGGLSELDKAGFIKRQLVETRQITKHVAQILDSRMNTKYDENDKLIREVKVITLKSKLVSDFRKDFQFYKVREINNYHHAHDAYLNAVVGTALIKKYPKLESEFVYGDYKVYDVRKMIAKSEQEIGKATAKYFFYSNIMNFFKTEITLANGEIRKRPLIETNGETGEIVWDKGRDFATVRKVLSMPQVNIVKKTEVQTGGFSKESILPKRNSDKLIARKKDWDPKKYGGFDSPTVAYSVLVVAKVEKGKSKKLKSVKELLGITIMERSSFEKNPIDFLEAKGYKEVKKDLIIKLPKYSLFELENGRKRMLASAGELQKGNELALPSKYVNFLYLASHYEKLKGSPEDNEQKQLFVEQHKHYLDEIIEQISEFSKRVILADANLDKVLSAYNKHRDKPIREQAENIIHLFTLTNLGAPAAFKYFDTTIDRKRYTSTKEVLDATLIHQSITGLYETRIDLSQLGGDGGPAPGSSGGGGGMNPLQLLQPLPAEIKGTKLLAHWNSGATITCIPESFLEDEQPIKKTLIKTIHGEKQQNVYYVTFKVKGRKVEAEVIASPYEYILLSPTDVPWLTQQPLQLTILVPLQEYQEKILSKTALPEDQKQQLKTLFVKYDNLWQHWENQVGHRKIRPHNIATGDYPPRPQKQYPINPKAKPSIQIVIDDLLKQGVLTPQNSTMNTPVYPVPKPDGRWRMVLDYREVNKTIPLTAAQNQHSAGILATIVRQKYKTTLDLANGFWAHPITPESYWLTAFTWQGKQYCWTRLPQGFLNSPALFNADVVDLLKEIPNVQVYVDDIYLSHDDPKEHVQQLEKVFQILLQAGYVVSLKKSEIGQKTVEFLGFNITKEGRGLTDTFKTKLLNITPPKDLKQLQSILGKLNFARNFIPNFAELVQPLYNLIAPAKGKYIEWSEENTKQLNMVIEALNTASNLEERLPEQRLVIKVNTSPSAGYVRYYNETGKKPIMYLNYVFSKAELKFSMLEKLLTTMHKALIKAMDLAMGQEILVYSPIVSMTKIQKTPLPERKALPIRWITWMTYLEDPRIQFHYDKTLPELKHIPDVYTSSQSPVKHPSQYEGVFYTDGSAIKSPDPTKSNNAGMGIVHATYKPEYQVLNQWSIPLGNHTAQMAEIAAVEFACKKALKIPGPVLVITDSFYVAESANKELPYWKSNGFVNNKKKPLKHISKWKSIAECLSMKPDITIQHEKGISLQIPVFILKGNALADKLATQGSYVVNAGKRTADGSEFEKRTADGSEFESPKKKAKVE

SEQ ID NO: 7441 - protein, 2125 aa, synthetic construct
MPAAKRVKLDGGDKKYSIGLDIGTNSVGWAVITDEYKVPSKKFKVLGNTDRHSIKKNLIGALLFDSGETAEATRLKRTARRRYTRRKNRICYLQEIFSNEMAKVDDSFFHRLEESFLVEEDKKHERHPIFGNIVDEVAYHEKYPTIYHLRKKLVDSTDKADLRLIYLALAHMIKFRGHFLIEGDLNPDNSDVDKLFIQLVQTYNQLFEENPINASGVDAKAILSARLSKSRRLENLIAQLPGEKKNGLFGNLIALSLGLTPNFKSNFDLAEDAKLQLSKDTYDDDLDNLLAQIGDQYADLFLAAKNLSDAILLSDILRVNTEITKAPLSASMIKRYDEHHQDLTLLKALVRQQLPEKYKEIFFDQSKNGYAGYIDGGASQEEFYKFIKPILEKMDGTEELLVKLNREDLLRKQRTFDNGSIPHQIHLGELHAILRRQEDFYPFLKDNREKIEKILTFRIPYYVGPLARGNSRFAWMTRKSEETITPWNFEEVVDKGASAQSFIERMTNFDKNLPNEKVLPKHSLLYEYFTVYNELTKVKYVTEGMRKPAFLSGEQKKAIVDLLFKTNRKVTVKQLKEDYFKKIECFDSVEISGVEDRFNASLGTYHDLLKIIKDKDFLDNEENEDILEDIVLTLTLFEDREMIEERLKTYAHLFDDKVMKQLKRRRYTGWGRLSRKLINGIRDKQSGKTILDFLKSDGFANRNFMQLIHDDSLTFKEDIQKAQVSGQGDSLHEHIANLAGSPAIKKGILQTVKVVDELVKVMGRHKPENIVIEMARENQTTQKGQKNSRERMKRIEEGIKELGSQILKEHPVENTQLQNEKLYLYYLQNGRDMYVDQELDINRLSDYDVDHIVPQSFLKDDSIDNKVLTRSDKARGKSDNVPSEEVVKKMKNYWRQLLNAKLITQRKFDNLTKAERGGLSELDKAGFIKRQLVETRQITKHVAQILDSRMNTKYDENDKLIREVKVITLKSKLVSDFRKDFQFYKVREINNYHHAHDAYLNAVVGTALIKKYPKLESEFVYGDYKVYDVRKMIAKSEQEIGKATAKYFFYSNIMNFFKTEITLANGEIRKRPLIETNGETGEIVWDKGRDFATVRKVLSMPQVNIVKKTEVQTGGFSKESILPKRNSDKLIARKKDWDPKKYGGFDSPTVAYSVLVVAKVEKGKSKKLKSVKELLGITIMERSSFEKNPIDFLEAKGYKEVKKDLIIKLPKYSLFELENGRKRMLASAGELQKGNELALPSKYVNFLYLASHYEKLKGSPEDNEQKQLFVEQHKHYLDEIIEQISEFSKRVILADANLDKVLSAYNKHRDKPIREQAENIIHLFTLTNLGAPAAFKYFDTTIDRKRYTSTKEVLDATLIHQSITGLYETRIDLSQLGGDGGPAPGSSGGGGGLLGRDLLTKLKAQIQFSTEGPQVTWEDRPAMCLVLNLEEEYRLHEKPVPPSIDPSWLQLFPMVWAEKAGMGLANQVPPVVVELKSDASPVAVRQYPMSKEAREGIRPHIQRFLDLGILVPCQSPWNTPLLPVKKPGTNDYRPVQDLREVNKRVQDIHPTVPNPYNLLSSLPPSHTWYSVLDLKDAFFCLKLHPNSQPLFAFEWRDPEKGNTGQLTWTRLPQGFKNSPTLFNEALHRDLASFRALNPQVVMLQYVDDLLVAAPTYRDCKEGTRRLLQELSKLGYRVSAKKAQLCREEVTYLGYLLKGGKRWLTPARKATVMKIPTPTTPRQVREFLGTAGFCRLWIPGFASLAAPLYPLTRPKVPFTWTEAHQEAFGRIKEALLSAPALALPDLTKPFALYVDEKEGVARGVLTQTLGPWRRPVAYLSKKLDPVASGWPTCLKAIAAVALLLKDADKLTLGQNVLVIAPHNLESIVRQPPDRWMTNARMTHYQSLLLNERVSFAPPAILNPATLLPVESDDTPIHICSEILAEETGTRPDLRDQPLPGVPAWYTDGSSFIMDGRRQAGAAIVDNKRTVWASNLPEGTSAQKAELIALTQALRLAEGKSINIYTDSRYAFATAHVHGAIYKQRGWLTSAGKDIKNKEEILALLEAIHLPKRVAIIHCPGHQRGTDPVATGNRKADEAAKQAAQSTRILTETTKNAGKRTADGSEFEKRTADGSEFESPKKKAKVE

SEQ ID NO: 7442 - protein, 2094 aa, synthetic construct
MPAAKRVKLDGGDKKYSIGLDIGTNSVGWAVITDEYKVPSKKFKVLGNTDRHSIKKNLIGALLFDSGETAEATRLKRTARRRYTRRKNRICYLQEIFSNEMAKVDDSFFHRLEESFLVEEDKKHERHPIFGNIVDEVAYHEKYPTIYHLRKKLVDSTDKADLRLIYLALAHMIKFRGHFLIEGDLNPDNSDVDKLFIQLVQTYNQLFEENPINASGVDAKAILSARLSKSRRLENLIAQLPGEKKNGLFGNLIALSLGLTPNFKSNFDLAEDAKLQLSKDTYDDDLDNLLAQIGDQYADLFLAAKNLSDAILLSDILRVNTEITKAPLSASMIKRYDEHHQDLTLLKALVRQQLPEKYKEIFFDQSKNGYAGYIDGGASQEEFYKFIKPILEKMDGTEELLVKLNREDLLRKQRTFDNGSIPHQIHLGELHAILRRQEDFYPFLKDNREKIEKILTFRIPYYVGPLARGNSRFAWMTRKSEETITPWNFEEVVDKGASAQSFIERMTNFDKNLPNEKVLPKHSLLYEYFTVYNELTKVKYVTEGMRKPAFLSGEQKKAIVDLLFKTNRKVTVKQLKEDYFKKIECFDSVEISGVEDRFNASLGTYHDLLKIIKDKDFLDNEENEDILEDIVLTLTLFEDREMIEERLKTYAHLFDDKVMKQLKRRRYTGWGRLSRKLINGIRDKQSGKTILDFLKSDGFANRNFMQLIHDDSLTFKEDIQKAQVSGQGDSLHEHIANLAGSPAIKKGILQTVKVVDELVKVMGRHKPENIVIEMARENQTTQKGQKNSRERMKRIEEGIKELGSQILKEHPVENTQLQNEKLYLYYLQNGRDMYVDQELDINRLSDYDVDHIVPQSFLKDDSIDNKVLTRSDKARGKSDNVPSEEVVKKMKNYWRQLLNAKLITQRKFDNLTKAERGGLSELDKAGFIKRQLVETRQITKHVAQILDSRMNTKYDENDKLIREVKVITLKSKLVSDFRKDFQFYKVREINNYHHAHDAYLNAVVGTALIKKYPKLESEFVYGDYKVYDVRKMIAKSEQEIGKATAKYFFYSNIMNFFKTEITLANGEIRKRPLIETNGETGEIVWDKGRDFATVRKVLSMPQVNIVKKTEVQTGGFSKESILPKRNSDKLIARKKDWDPKKYGGFDSPTVAYSVLVVAKVEKGKSKKLKSVKELLGITIMERSSFEKNPIDFLEAKGYKEVKKDLIIKLPKYSLFELENGRKRMLASAGELQKGNELALPSKYVNFLYLASHYEKLKGSPEDNEQKQLFVEQHKHYLDEIIEQISEFSKRVILADANLDKVLSAYNKHRDKPIREQAENIIHLFTLTNLGAPAAFKYFDTTIDRKRYTSTKEVLDATLIHQSITGLYETRIDLSQLGGDGGPAPGSSGGGGGTLNLEDEYRLYETSAEPEVSPGSTWLSDFPQAWAETGGMGLAVRQAPLIIPLKATSTPVSIKQYPMSQEAKLGIKPHIQRLLDQGILVPCQSPWNTPLLPVKKPGTNDYRPVQDLREVNKRVEDIHPTVPNPYNLLSGLPPSHRWYTVLDLKDAFFCLRLHPTSQPLFAFEWRDPGMGISGQLTWTRLPQGFKNSPTLFNEALHRDLADFRIQHPDLILLQYVDDILLAATSELDCQQGTRALLLTLGNLGYRASAKKAQLCQKQVKYLGYLLKEGQRWLTEARKETVMGQPTPKTPRQLREFLGTAGFCRLWIPGFAEMAAPLYPLTKPGTLFNWGPDQQKAYQEIKQALLTAPALGLPDLTKPFELFVDEKQGYAKGVLTQKLGPWRRPVAYLSKKLDPVAAGWPPCLRMVAAIAVLRKDAGKLTMGQPLVILAPHAVEALVKQPPDRWLSNARMTHYQAMLLDTDRVQFGPVVALNPATLLPLPEEGAPHDCLEILAETHGTRPDLTDQPIPDADHTWYTDGSSFLQEGQRKAGAAVTTETEVIWARALPAGTSAQRAELIALTQALKMAEGKRLNVYTDSRYAFATAHIHGEIYRRRGWLTSEGREIKNKSEILALLKALFLPKRLSIIHCLGHQKGDSAEARGNRLADQAAREAAIKTPPDTSTLLAGKRTADGSEFEKRTADGSEFESPKKKAKVE

SEQ ID NO: 7443 - protein, 2094 aa, synthetic construct; identical to SEQ ID NO: 4533

SEQ ID NO: 7444 - protein, 2094 aa, synthetic construct
MPAAKRVKLDGGDKKYSIGLDIGTNSVGWAVITDEYKVPSKKFKVLGNTDRHSIKKNLIGALLFDSGETAEATRLKRTARRRYTRRKNRICYLQEIFSNEMAKVDDSFFHRLEESFLVEEDKKHERHPIFGNIVDEVAYHEKYPTIYHLRKKLVDSTDKADLRLIYLALAHMIKFRGHFLIEGDLNPDNSDVDKLFIQLVQTYNQLFEENPINASGVDAKAILSARLSKSRRLENLIAQLPGEKKNGLFGNLIALSLGLTPNFKSNFDLAEDAKLQLSKDTYDDDLDNLLAQIGDQYADLFLAAKNLSDAILLSDILRVNTEITKAPLSASMIKRYDEHHQDLTLLKALVRQQLPEKYKEIFFDQSKNGYAGYIDGGASQEEFYKFIKPILEKMDGTEELLVKLNREDLLRKQRTFDNGSIPHQIHLGELHAILRRQEDFYPFLKDNREKIEKILTFRIPYYVGPLARGNSRFAWMTRKSEETITPWNFEEVVDKGASAQSFIERMTNFDKNLPNEKVLPKHSLLYEYFTVYNELTKVKYVTEGMRKPAFLSGEQKKAIVDLLFKTNRKVTVKQLKEDYFKKIECFDSVEISGVEDRFNASLGTYHDLLKIIKDKDFLDNEENEDILEDIVLTLTLFEDREMIEERLKTYAHLFDDKVMKQLKRRRYTGWGRLSRKLINGIRDKQSGKTILDFLKSDGFANRNFMQLIHDDSLTFKEDIQKAQVSGQGDSLHEHIANLAGSPAIKKGILQTVKVVDELVKVMGRHKPENIVIEMARENQTTQKGQKNSRERMKRIEEGIKELGSQILKEHPVENTQLQNEKLYLYYLQNGRDMYVDQELDINRLSDYDVDHIVPQSFLKDDSIDNKVLTRSDKARGKSDNVPSEEVVKKMKNYWRQLLNAKLITQRKFDNLTKAERGGLSELDKAGFIKRQLVETRQITKHVAQILDSRMNTKYDENDKLIREVKVITLKSKLVSDFRKDFQFYKVREINNYHHAHDAYLNAVVGTALIKKYPKLESEFVYGDYKVYDVRKMIAKSEQEIGKATAKYFFYSNIMNFFKTEITLANGEIRKRPLIETNGETGEIVWDKGRDFATVRKVLSMPQVNIVKKTEVQTGGFSKESILPKRNSDKLIARKKDWDPKKYGGFDSPTVAYSVLVVAKVEKGKSKKLKSVKELLGITIMERSSFEKNPIDFLEAKGYKEVKKDLIIKLPKYSLFELENGRKRMLASAGELQKGNELALPSKYVNFLYLASHYEKLKGSPEDNEQKQLFVEQHKHYLDEIIEQISEFSKRVILADANLDKVLSAYNKHRDKPIREQAENIIHLFTLTNLGAPAAFKYFDTTIDRKRYTSTKEVLDATLIHQSITGLYETRIDLSQLGGDGGPAPGSSGGGGGTLNIEDEHRLHETSKEPDVSLGSTWLSDFPQAWAETGGMGLAVRQAPLIIPLKATSTPVSIKQYPMSQEARLGIKPHIQRLLDQGILVPCQSPWNTPLLPVKKPGTNDYRPVQDLREVNKRVEDIHPTVPNPYNLLSGLPPSHQWYTVLDLKDAFFCLRLHPTSQPLFAFEWRDPEMGISGQLTWTRLPQGFKNSPTLFNEALHRDLADFRIQHPDLILLQYVDDLLLAATSELDCQQGTRALLQTLGNLGYRASAKKAQICQKQVKYLGYLLKEGQRWLTEARKETVMGQPTPKTPRQLREFLGTAGFCRLWIPGFAEMAAPLYPLTKPGTLFNWGPDQQKAYQEIKQALLTAPALGLPDLTKPFELFVDEKQGYAKGVLTQKLGPWRRPVAYLSKKLDPVAAGWPPCLRMVAAIAVLTKDAGKLTMGQPLVILAPHAVEALVKQPPDRWLSNARMTHYQALLLDTDRVQFGPVVALNPATLLPLPEEGLQHNCLDILAEAHGTRPDLTDQPLPDADHTWYTDGSSLLQEGQRKAGAAVTTETEVIWAKALPAGTSAQRAELIALTQALKMAEGKKLNVYTDSRYAFATAHIHGEIYRRRGWLTSEGKEIKNKDEILALLKALFLPKRLSIIHCPGHQKGHSAEARGNRMADQAARKAAITETPDTSTLLAGKRTADGSEFEKRTADGSEFESPKKKAKVE

SEQ ID NO: 7445 - protein, 2094 aa, synthetic construct; identical to SEQ ID NO: 7444

SEQ ID NO: 7446 - protein, 2174 aa, synthetic construct
MPAAKRVKLDGGDKKYSIGLDIGTNSVGWAVITDEYKVPSKKFKVLGNTDRHSIKKNLIGALLFDSGETAEATRLKRTARRRYTRRKNRICYLQEIFSNEMAKVDDSFFHRLEESFLVEEDKKHERHPIFGNIVDEVAYHEKYPTIYHLRKKLVDSTDKADLRLIYLALAHMIKFRGHFLIEGDLNPDNSDVDKLFIQLVQTYNQLFEENPINASGVDAKAILSARLSKSRRLENLIAQLPGEKKNGLFGNLIALSLGLTPNFKSNFDLAEDAKLQLSKDTYDDDLDNLLAQIGDQYADLFLAAKNLSDAILLSDILRVNTEITKAPLSASMIKRYDEHHQDLTLLKALVRQQLPEKYKEIFFDQSKNGYAGYIDGGASQEEFYKFIKPILEKMDGTEELLVKLNREDLLRKQRTFDNGSIPHQIHLGELHAILRRQEDFYPFLKDNREKIEKILTFRIPYYVGPLARGNSRFAWMTRKSEETITPWNFEEVVDKGASAQSFIERMTNFDKNLPNEKVLPKHSLLYEYFTVYNELTKVKYVTEGMRKPAFLSGEQKKAIVDLLFKTNRKVTVKQLKEDYFKKIECFDSVEISGVEDRFNASLGTYHDLLKIIKDKDFLDNEENEDILEDIVLTLTLFEDREMIEERLKTYAHLFDDKVMKQLKRRRYTGWGRLSRKLINGIRDKQSGKTILDFLKSDGFANRNFMQLIHDDSLTFKEDIQKAQVSGQGDSLHEHIANLAGSPAIKKGILQTVKVVDELVKVMGRHKPENIVIEMARENQTTQKGQKNSRERMKRIEEGIKELGSQILKEHPVENTQLQNEKLYLYYLQNGRDMYVDQELDINRLSDYDVDHIVPQSFLKDDSIDNKVLTRSDKARGKSDNVPSEEVVKKMKNYWRQLLNAKLITQRKFDNLTKAERGGLSELDKAGFIKRQLVETRQITKHVAQILDSRMNTKYDENDKLIREVKVITLKSKLVSDFRKDFQFYKVREINNYHHAHDAYLNAVVGTALIKKYPKLESEFVYGDYKVYDVRKMIAKSEQEIGKATAKYFFYSNIMNFFKTEITLANGEIRKRPLIETNGETGEIVWDKGRDFATVRKVLSMPQVNIVKKTEVQTGGFSKESILPKRNSDKLIARKKDWDPKKYGGFDSPTVAYSVLVVAKVEKGKSKKLKSVKELLGITIMERSSFEKNPIDFLEAKGYKEVKKDLIIKLPKYSLFELENGRKRMLASAGELQKGNELALPSKYVNFLYLASHYEKLKGSPEDNEQKQLFVEQHKHYLDEIIEQISEFSKRVILADANLDKVLSAYNKHRDKPIREQAENIIHLFTLTNLGAPAAFKYFDTTIDRKRYTSTKEVLDATLIHQSITGLYETRIDLSQLGGDGGPAPGSSGGGGGMDPLQLLQPLEAEIKGTKLKAHWNSGATITCVPQAFLEEEVPIKNIWIKTIHGEKEQPVYYLTFKIQGRKVEAEVISSPYDYILVSPSDIPWLMKKPLQLTTLVPLQEYEERLLKQTMLTGSYKEKLQSLFLKYDALWQHWENQVGHRRIKPHHIATGTVNPRPQKQYPINPKAKASIQTVINDLLKQGVLIQQNSIMNTPVYPVPKPDGKWRMVLDYREVNKTIPLIAAQNQHSAGILSSIFRGKYKTTLDLSNGFWAHSITPESYWLTAFTWLGQQYCWTRLPQGFLNSPALFNADVVDLLKEVPNVQVYVDDIYISHDDPREHLEQLEKVFSLLLNAGYVVSLKKSEIAQHEVEFLGFNITKEGRGLTETFKQKLLNITPPRDLKQLQSILGKLNFARNFIPNFSELVKPLYNIIATAPGKYITWTTDNSQQLQNIISMLNSAENLEERNPEVRLIMKVNTSPSAGYIRFYNEFAKRPIMYLNYVYTKAEVKFTNTEKLLTTIHKGLIKALDLGMGQEILVYSPIVSMTKIQKTPLPERKALPIRWITWMSYLEDPRIQFHYDKTLPELQQVPTVTDDIIAKIKHPSEFSMVFYTDGSAIKHPNVNKSHNAGMGIAQVQFKPEFTVINTWSIPLGDHTAQLAEVAAVEFACKKALKIDGPVLIVTDSFYVAESVNKELPYWQSNGFFNNKKKPLKHVSKWKSIADCIQLKPDIIIIHEKGHQPTASTFHTEGNNLADKLATQGSYVVNAGKRTADGSEFEKRTADGSEFESPKKKAKVE

SEQ ID NO: 7447 - protein, 2094 aa, synthetic construct
MPAAKRVKLDGGDKKYSIGLDIGTNSVGWAVITDEYKVPSKKFKVLGNTDRHSIKKNLIGALLFDSGETAEATRLKRTARRRYTRRKNRICYLQEIFSNEMAKVDDSFFHRLEESFLVEEDKKHERHPIFGNIVDEVAYHEKYPTIYHLRKKLVDSTDKADLRLIYLALAHMIKFRGHFLIEGDLNPDNSDVDKLFIQLVQTYNQLFEENPINASGVDAKAILSARLSKSRRLENLIAQLPGEKKNGLFGNLIALSLGLTPNFKSNFDLAEDAKLQLSKDTYDDDLDNLLAQIGDQYADLFLAAKNLSDAILLSDILRVNTEITKAPLSASMIKRYDEHHQDLTLLKALVRQQLPEKYKEIFFDQSKNGYAGYIDGGASQEEFYKFIKPILEKMDGTEELLVKLNREDLLRKQRTFDNGSIPHQIHLGELHAILRRQEDFYPFLKDNREKIEKILTFRIPYYVGPLARGNSRFAWMTRKSEETITPWNFEEVVDKGASAQSFIERMTNFDKNLPNEKVLPKHSLLYEYFTVYNELTKVKYVTEGMRKPAFLSGEQKKAIVDLLFKTNRKVTVKQLKEDYFKKIECFDSVEISGVEDRFNASLGTYHDLLKIIKDKDFLDNEENEDILEDIVLTLTLFEDREMIEERLKTYAHLFDDKVMKQLKRRRYTGWGRLSRKLINGIRDKQSGKTILDFLKSDGFANRNFMQLIHDDSLTFKEDIQKAQVSGQGDSLHEHIANLAGSPAIKKGILQTVKVVDELVKVMGRHKPENIVIEMARENQTTQKGQKNSRERMKRIEEGIKELGSQILKEHPVENTQLQNEKLYLYYLQNGRDMYVDQELDINRLSDYDVDHIVPQSFLKDDSIDNKVLTRSDKARGKSDNVPSEEVVKKMKNYWRQLLNAKLITQRKFDNLTKAERGGLSELDKAGFIKRQLVETRQITKHVAQILDSRMNTKYDENDKLIREVKVITLKSKLVSDFRKDFQFYKVREINNYHHAHDAYLNAVVGTALIKKYPKLESEFVYGDYKVYDVRKMIAKSEQEIGKATAKYFFYSNIMNFFKTEITLANGEIRKRPLIETNGETGEIVWDKGRDFATVRKVLSMPQVNIVKKTEVQTGGFSKESILPKRNSDKLIARKKDWDPKKYGGFDSPTVAYSVLVVAKVEKGKSKKLKSVKELLGITIMERSSFEKNPIDFLEAKGYKEVKKDLIIKLPKYSLFELENGRKRMLASAGELQKGNELALPSKYVNFLYLASHYEKLKGSPEDNEQKQLFVEQHKHYLDEIIEQISEFSKRVILADANLDKVLSAYNKHRDKPIREQAENIIHLFTLTNLGAPAAFKYFDTTIDRKRYTSTKEVLDATLIHQSITGLYETRIDLSQLGGDGGPAPGSSGGGGGTLNIEDEYRLHETSKEPDVPLGSTWLSDFPQAWAETGGMGLAVRQAPLIIPLKATSTPVSIKQYPMSQEARLGIKPHIQRLLDQGILVPCQSPWNTPLLPVKKPGTNDYRPVQDLREVNKRVEDIHPTVPNPYNLLSGLPPSHQWYTVLDLKDAFFCLRLHPTSQPLFAFEWRDPEMGISGQLTWTRLPQGFKNSPTLFNEALHRDLADFRIQHPDLILLQYVDDLLLAATSEQDCQRGTRALLQTLGNLGYRASAKKAQICQKQVKYLGYLLKEGQRWLTEARKETVMGQPTPKTPRQLREFLGTAGFCRLWIPGFAEMAAPLYPLTKPGTLFNWGPDQQKAYQEIKQALLTAPALGLPDLTKPFELFVDEKQGYAKGVLTQKLGPWRRPVAYLSKKLDPVAAGWPPCLRMVAAIAVLTKDAGKLTMGQPLVILAPHAVEALVKQPPDRWLSNARMTHYQAMLLDTDRVQFGPVVALNPATLLPLPEKEAPHDCLEILAETHGTRPDLTDQPIPDADYTWYTDGSSFLQEGQRRAGAAVTTETEVIWARALPAGTSAQRAELIALTQALKMAEGKKLNVYTDSRYAFATAHVHGEIYRRRGWLTSEGREIKNKNEILALLKALFLPKRLSIIHCPGHQKGNSAEARGNRMADQAAREAAMKAVLETSTLLAGKRTADGSEFEKRTADGSEFESPKKKAKVE

SEQ ID NO: 7448 - protein, 2087 aa, synthetic construct
MPAAKRVKLDGGDKKYSIGLDIGTNSVGWAVITDEYKVPSKKFKVLGNTDRHSIKKNLIGALLFDSGETAEATRLKRTARRRYTRRKNRICYLQEIFSNEMAKVDDSFFHRLEESFLVEEDKKHERHPIFGNIVDEVAYHEKYPTIYHLRKKLVDSTDKADLRLIYLALAHMIKFRGHFLIEGDLNPDNSDVDKLFIQLVQTYNQLFEENPINASGVDAKAILSARLSKSRRLENLIAQLPGEKKNGLFGNLIALSLGLTPNFKSNFDLAEDAKLQLSKDTYDDDLDNLLAQIGDQYADLFLAAKNLSDAILLSDILRVNTEITKAPLSASMIKRYDEHHQDLTLLKALVRQQLPEKYKEIFFDQSKNGYAGYIDGGASQEEFYKFIKPILEKMDGTEELLVKLNREDLLRKQRTFDNGSIPHQIHLGELHAILRRQEDFYPFLKDNREKIEKILTFRIPYYVGPLARGNSRFAWMTRKSEETITPWNFEEVVDKGASAQSFIERMTNFDKNLPNEKVLPKHSLLYEYFTVYNELTKVKYVTEGMRKPAFLSGEQKKAIVDLLFKTNRKVTVKQLKEDYFKKIECFDSVEISGVEDRFNASLGTYHDLLKIIKDKDFLDNEENEDILEDIVLTLTLFEDREMIEERLKTYAHLFDDKVMKQLKRRRYTGWGRLSRKLINGIRDKQSGKTILDFLKSDGFANRNFMQLIHDDSLTFKEDIQKAQVSGQGDSLHEHIANLAGSPAIKKGILQTVKVVDELVKVMGRHKPENIVIEMARENQTTQKGQKNSRERMKRIEEGIKELGSQILKEHPVENTQLQNEKLYLYYLQNGRDMYVDQELDINRLSDYDVDHIVPQSFLKDDSIDNKVLTRSDKARGKSDNVPSEEVVKKMKNYWRQLLNAKLITQRKFDNLTKAERGGLSELDKAGFIKRQLVETRQITKHVAQILDSRMNTKYDENDKLIREVKVITLKSKLVSDFRKDFQFYKVREINNYHHAHDAYLNAVVGTALIKKYPKLESEFVYGDYKVYDVRKMIAKSEQEIGKATAKYFFYSNIMNFFKTEITLANGEIRKRPLIETNGETGEIVWDKGRDFATVRKVLSMPQVNIVKKTEVQTGGFSKESILPKRNSDKLIARKKDWDPKKYGGFDSPTVAYSVLVVAKVEKGKSKKLKSVKELLGITIMERSSFEKNPIDFLEAKGYKEVKKDLIIKLPKYSLFELENGRKRMLASAGELQKGNELALPSKYVNFLYLASHYEKLKGSPEDNEQKQLFVEQHKHYLDEIIEQISEFSKRVILADANLDKVLSAYNKHRDKPIREQAENIIHLFTLTNLGAPAAFKYFDTTIDRKRYTSTKEVLDATLIHQSITGLYETRIDLSQLGGDGGGGGEAAAKPAPGGVPWILKKPLELTIKLDLEEQQGTLLNNSILSKKGKEELKQLFEKYSALWQSWENQVGHRRIRPHKIATGTVKPTPQKQYHINPKAKPDIQIVINDLLKQGVLIQKESTMNTPVYPVPKPNGRWRMVLDYRAVNKVTPLIAVQNQHSYGILGSLFKGRYKTTIDLSNGFWAHPIVPEDYWITAFTWQGKQYCWTVLPQGFLNSPGLFTGDVVDLLQGIPNVEVYVDDVYISHDSEKEHLEYLDILFNRLKEAGYIISLKKSNIANSIVDFLGFQITNEGRGLTDTFKEKLENITAPTTLKQLQSILGLLNFARNFIPDFTELIAPLYALIPKSTKNYVPWQIEHSTTLETLITKLNGAEYLQGRKGDKTLIMKVNASYTTGYIRYYNEGEKKPISYVSIVFSKTELKFTELEKLLTTVHKGLLKALDLSMGQNIHVYSPIVSMQNIQKTPQTAKKALASRWLSWLSYLEDPRIRFFYDPQMPALKDLPAVDTGKDNKKHPSNFQHIFYTDGSAITSPTKEGHLNAGMGIVYFINKDGNLQKQQEWSISLGNHTAQFAEIAAFEFALKKCLPLGGNILVVTDSNYVAKAYNEELDVWASNGFVNNRKKPLKHISKWKSVADLKRLRPDVVVTHEPGHQKLDSSPHAYGNNLADQLATQASFKVHAGKRTADGSEFEKRTADGSEFESPKKKAKVE

SEQ ID NO: 7449 - protein, 2087 aa, synthetic construct
MPAAKRVKLDGGDKKYSIGLDIGTNSVGWAVITDEYKVPSKKFKVLGNTDRHSIKKNLIGALLFDSGETAEATRLKRTARRRYTRRKNRICYLQEIFSNEMAKVDDSFFHRLEESFLVEEDKKHERHPIFGNIVDEVAYHEKYPTIYHLRKKLVDSTDKADLRLIYLALAHMIKFRGHFLIEGDLNPDNSDVDKLFIQLVQTYNQLFEENPINASGVDAKAILSARLSKSRRLENLIAQLPGEKKNGLFGNLIALSLGLTPNFKSNFDLAEDAKLQLSKDTYDDDLDNLLAQIGDQYADLFLAAKNLSDAILLSDILRVNTEITKAPLSASMIKRYDEHHQDLTLLKALVRQQLPEKYKEIFFDQSKNGYAGYIDGGASQEEFYKFIKPILEKMDGTEELLVKLNREDLLRKQRTFDNGSIPHQIHLGELHAILRRQEDFYPFLKDNREKIEKILTFRIPYYVGPLARGNSRFAWMTRKSEETITPWNFEEVVDKGASAQSFIERMTNFDKNLPNEKVLPKHSLLYEYFTVYNELTKVKYVTEGMRKPAFLSGEQKKAIVDLLFKTNRKVTVKQLKEDYFKKIECFDSVEISGVEDRFNASLGTYHDLLKIIKDKDFLDNEENEDILEDIVLTLTLFEDREMIEERLKTYAHLFDDKVMKQLKRRRYTGWGRLSRKLINGIRDKQSGKTILDFLKSDGFANRNFMQLIHDDSLTFKEDIQKAQVSGQGDSLHEHIANLAGSPAIKKGILQTVKVVDELVKVMGRHKPENIVIEMARENQTTQKGQKNSRERMKRIEEGIKELGSQILKEHPVENTQLQNEKLYLYYLQNGRDMYVDQELDINRLSDYDVDHIVPQSFLKDDSIDNKVLTRSDKARGKSDNVPSEEVVKKMKNYWRQLLNAKLITQRKFDNLTKAERGGLSELDKAGFIKRQLVETRQITKHVAQILDSRMNTKYDENDKLIREVKVITLKSKLVSDFRKDFQFYKVREINNYHHAHDAYLNAVVGTALIKKYPKLESEFVYGDYKVYDVRKMIAKSEQEIGKATAKYFFYSNIMNFFKTEITLANGEIRKRPLIETNGETGEIVWDKGRDFATVRKVLSMPQVNIVKKTEVQTGGFSKESILPKRNSDKLIARKKDWDPKKYGGFDSPTVAYSVLVVAKVEKGKSKKLKSVKELLGITIMERSSFEKNPIDFLEAKGYKEVKKDLIIKLPKYSLFELENGRKRMLASAGELQKGNELALPSKYVNFLYLASHYEKLKGSPEDNEQKQLFVEQHKHYLDEIIEQISEFSKRVILADANLDKVLSAYNKHRDKPIREQAENIIHLFTLTNLGAPAAFKYFDTTIDRKRYTSTKEVLDATLIHQSITGLYETRIDLSQLGGDGGGGGEAAAKPAPGGVPWILKKPLELTIKLDLEEQQGTLLNNSILSKKGKEELKQLFEKYSALWQSWENQVGHRRIRPHKIATGTVKPTPQKQYHINPKAKPDIQIVINDLLKQGVLIQKESTMNTPVYPVPKPNGRWRMVLDYRAVNKVTPLIAVQNQHSYGILGSLFKGRYKTTIDLSNGFWAHPIVPEDYWITAFTWQGKQYCWTVLPQGFLNSPGLFNGDVVDLLQGIPNVEVYVDDVYISHDSEKEHLEYLDILFNRLKEAGYIISLKKSNIANSIVDFLGFQITNEGRGLTDTFKEKLENITAPTTLKQLQSILGLLNFARNFIPDFTELIAPLYALIPKSPKNYVPWQIEHSTTLETLITKLNGAEYLQGRKGDKTLIMKVNASYTTGYIRYYNEGEKKPISYVSIVFSKTELKFTELEKLLTTVHKGLLKALDLSMGQNIHVYSPIVSMQNIQKTPQTAKKALASRWLSWLSYLEDPRIRFFYDPQMPALKDLPAVDTGKDNKKHPSNFQHIFYTDGSAITSPTKEGHLNAGMGIVYFINKDGNLQKQQEWSISLGNHTAQFAEIAAFEFALKKCLPLGGNILVVTDSNYVAKAYNEELDVWASNGFVNNRKKPLKHISKWKSVADLKRLRPDVVVTHEPGHQKLDSSPHAYGNNLADQLATQASFKVHAGKRTADGSEFEKRTADGSEFESPKKKAKVE

SEQ ID NO: 7450 - protein, 2176 aa, synthetic construct
MPAAKRVKLDGGDKKYSIGLDIGTNSVGWAVITDEYKVPSKKFKVLGNTDRHSIKKNLIGALLFDSGETAEATRLKRTARRRYTRRKNRICYLQEIFSNEMAKVDDSFFHRLEESFLVEEDKKHERHPIFGNIVDEVAYHEKYPTIYHLRKKLVDSTDKADLRLIYLALAHMIKFRGHFLIEGDLNPDNSDVDKLFIQLVQTYNQLFEENPINASGVDAKAILSARLSKSRRLENLIAQLPGEKKNGLFGNLIALSLGLTPNFKSNFDLAEDAKLQLSKDTYDDDLDNLLAQIGDQYADLFLAAKNLSDAILLSDILRVNTEITKAPLSASMIKRYDEHHQDLTLLKALVRQQLPEKYKEIFFDQSKNGYAGYIDGGASQEEFYKFIKPILEKMDGTEELLVKLNREDLLRKQRTFDNGSIPHQIHLGELHAILRRQEDFYPFLKDNREKIEKILTFRIPYYVGPLARGNSRFAWMTRKSEETITPWNFEEVVDKGASAQSFIERMTNFDKNLPNEKVLPKHSLLYEYFTVYNELTKVKYVTEGMRKPAFLSGEQKKAIVDLLFKTNRKVTVKQLKEDYFKKIECFDSVEISGVEDRFNASLGTYHDLLKIIKDKDFLDNEENEDILEDIVLTLTLFEDREMIEERLKTYAHLFDDKVMKQLKRRRYTGWGRLSRKLINGIRDKQSGKTILDFLKSDGFANRNFMQLIHDDSLTFKEDIQKAQVSGQGDSLHEHIANLAGSPAIKKGILQTVKVVDELVKVMGRHKPENIVIEMARENQTTQKGQKNSRERMKRIEEGIKELGSQILKEHPVENTQLQNEKLYLYYLQNGRDMYVDQELDINRLSDYDVDHIVPQSFLKDDSIDNKVLTRSDKARGKSDNVPSEEVVKKMKNYWRQLLNAKLITQRKFDNLTKAERGGLSELDKAGFIKRQLVETRQITKHVAQILDSRMNTKYDENDKLIREVKVITLKSKLVSDFRKDFQFYKVREINNYHHAHDAYLNAVVGTALIKKYPKLESEFVYGDYKVYDVRKMIAKSEQEIGKATAKYFFYSNIMNFFKTEITLANGEIRKRPLIETNGETGEIVWDKGRDFATVRKVLSMPQVNIVKKTEVQTGGFSKESILPKRNSDKLIARKKDWDPKKYGGFDSPTVAYSVLVVAKVEKGKSKKLKSVKELLGITIMERSSFEKNPIDFLEAKGYKEVKKDLIIKLPKYSLFELENGRKRMLASAGELQKGNELALPSKYVNFLYLASHYEKLKGSPEDNEQKQLFVEQHKHYLDEIIEQISEFSKRVILADANLDKVLSAYNKHRDKPIREQAENIIHLFTLTNLGAPAAFKYFDTTIDRKRYTSTKEVLDATLIHQSITGLYETRIDLSQLGGDGGGGGEAAAKPAPGGMNPLQLLQPLPAEIKGTKLLAHWNSGATITCIPESFLEDEQPIKKTLIKTIHGEKQQNVYYVTFKVKGRKVEAEVIASPYEYILLSPTDVPWLTQQPLQLTILVPLQEYQEKILSKTALPEDQKQQLKTLFVKYDNLWQHWENQVGHRKIRPHNIATGDYPPRPQKQYPINPKAKPSIQIVIDDLLKQGVLTPQNSTMNTPVYPVPKPDGRWRMVLDYREVNKTIPLTAAQNQHSAGILATIVRQKYKTTLDLANGFWAHPITPESYWLTAFTWQGKQYCWTRLPQGFLNSPALFNADVVDLLKEIPNVQVYVDDIYLSHDDPKEHVQQLEKVFQILLQAGYVVSLKKSEIGQKTVEFLGFNITKEGRGLTDTFKTKLLNITPPKDLKQLQSILGKLNFARNFIPNFAELVQPLYNLIAPAKGKYIEWSEENTKQLNMVIEALNTASNLEERLPEQRLVIKVNTSPSAGYVRYYNETGKKPIMYLNYVFSKAELKFSMLEKLLTTMHKALIKAMDLAMGQEILVYSPIVSMTKIQKTPLPERKALPIRWITWMTYLEDPRIQFHYDKTLPELKHIPDVYTSSQSPVKHPSQYEGVFYTDGSAIKSPDPTKSNNAGMGIVHATYKPEYQVLNQWSIPLGNHTAQMAEIAAVEFACKKALKIPGPVLVITDSFYVAESANKELPYWKSNGFVNNKKKPLKHISKWKSIAECLSMKPDITIQHEKGISLQIPVFILKGNALADKLATQGSYVVNAGKRTADGSEFEKRTADGSEFESPKKKAKVE

SEQ ID NO: 7451 - protein, 2127 aa, synthetic construct
MPAAKRVKLDGGDKKYSIGLDIGTNSVGWAVITDEYKVPSKKFKVLGNTDRHSIKKNLIGALLFDSGETAEATRLKRTARRRYTRRKNRICYLQEIFSNEMAKVDDSFFHRLEESFLVEEDKKHERHPIFGNIVDEVAYHEKYPTIYHLRKKLVDSTDKADLRLIYLALAHMIKFRGHFLIEGDLNPDNSDVDKLFIQLVQTYNQLFEENPINASGVDAKAILSARLSKSRRLENLIAQLPGEKKNGLFGNLIALSLGLTPNFKSNFDLAEDAKLQLSKDTYDDDLDNLLAQIGDQYADLFLAAKNLSDAILLSDILRVNTEITKAPLSASMIKRYDEHHQDLTLLKALVRQQLPEKYKEIFFDQSKNGYAGYIDGGASQEEFYKFIKPILEKMDGTEELLVKLNREDLLRKQRTFDNGSIPHQIHLGELHAILRRQEDFYPFLKDNREKIEKILTFRIPYYVGPLARGNSRFAWMTRKSEETITPWNFEEVVDKGASAQSFIERMTNFDKNLPNEKVLPKHSLLYEYFTVYNELTKVKYVTEGMRKPAFLSGEQKKAIVDLLFKTNRKVTVKQLKEDYFKKIECFDSVEISGVEDRFNASLGTYHDLLKIIKDKDFLDNEENEDILEDIVLTLTLFEDREMIEERLKTYAHLFDDKVMKQLKRRRYTGWGRLSRKLINGIRDKQSGKTILDFLKSDGFANRNFMQLIHDDSLTFKEDIQKAQVSGQGDSLHEHIANLAGSPAIKKGILQTVKVVDELVKVMGRHKPENIVIEMARENQTTQKGQKNSRERMKRIEEGIKELGSQILKEHPVENTQLQNEKLYLYYLQNGRDMYVDQELDINRLSDYDVDHIVPQSFLKDDSIDNKVLTRSDKARGKSDNVPSEEVVKKMKNYWRQLLNAKLITQRKFDNLTKAERGGLSELDKAGFIKRQLVETRQITKHVAQILDSRMNTKYDENDKLIREVKVITLKSKLVSDFRKDFQFYKVREINNYHHAHDAYLNAVVGTALIKKYPKLESEFVYGDYKVYDVRKMIAKSEQEIGKATAKYFFYSNIMNFFKTEITLANGEIRKRPLIETNGETGEIVWDKGRDFATVRKVLSMPQVNIVKKTEVQTGGFSKESILPKRNSDKLIARKKDWDPKKYGGFDSPTVAYSVLVVAKVEKGKSKKLKSVKELLGITIMERSSFEKNPIDFLEAKGYKEVKKDLIIKLPKYSLFELENGRKRMLASAGELQKGNELALPSKYVNFLYLASHYEKLKGSPEDNEQKQLFVEQHKHYLDEIIEQISEFSKRVILADANLDKVLSAYNKHRDKPIREQAENIIHLFTLTNLGAPAAFKYFDTTIDRKRYTSTKEVLDATLIHQSITGLYETRIDLSQLGGDGGGGGEAAAKPAPGGLLGRDLLTKLKAQIQFSTEGPQVTWEDRPAMCLVLNLEEEYRLHEKPVPPSIDPSWLQLFPMVWAEKAGMGLANQVPPVVVELKSDASPVAVRQYPMSKEAREGIRPHIQRFLDLGILVPCQSPWNTPLLPVKKPGTNDYRPVQDLREVNKRVQDIHPTVPNPYNLLSSLPPSHTWYSVLDLKDAFFCLKLHPNSQPLFAFEWRDPEKGNTGQLTWTRLPQGFKNSPTLFNEALHRDLASFRALNPQVVMLQYVDDLLVAAPTYRDCKEGTRRLLQELSKLGYRVSAKKAQLCREEVTYLGYLLKGGKRWLTPARKATVMKIPTPTTPRQVREFLGTAGFCRLWIPGFASLAAPLYPLTRPKVPFTWTEAHQEAFGRIKEALLSAPALALPDLTKPFALYVDEKEGVARGVLTQTLGPWRRPVAYLSKKLDPVASGWPTCLKAIAAVALLLKDADKLTLGQNVLVIAPHNLESIVRQPPDRWMTNARMTHYQSLLLNERVSFAPPAILNPATLLPVESDDTPIHICSEILAEETGTRPDLRDQPLPGVPAWYTDGSSFIMDGRRQAGAAIVDNKRTVWASNLPEGTSAQKAELIALTQALRLAEGKSINIYTDSRYAFATAHVHGAIYKQRGWLTSAGKDIKNKEEILALLEAIHLPKRVAIIHCPGHQRGTDPVATGNRKADEAAKQAAQSTRILTETTKNAGKRTADGSEFEKRTADGSEFESPKKKAKVE

SEQ ID NO: 7452 - protein, 2096 aa, synthetic construct
MPAAKRVKLDGGDKKYSIGLDIGTNSVGWAVITDEYKVPSKKFKVLGNTDRHSIKKNLIGALLFDSGETAEATRLKRTARRRYTRRKNRICYLQEIFSNEMAKVDDSFFHRLEESFLVEEDKKHERHPIFGNIVDEVAYHEKYPTIYHLRKKLVDSTDKADLRLIYLALAHMIKFRGHFLIEGDLNPDNSDVDKLFIQLVQTYNQLFEENPINASGVDAKAILSARLSKSRRLENLIAQLPGEKKNGLFGNLIALSLGLTPNFKSNFDLAEDAKLQLSKDTYDDDLDNLLAQIGDQYADLFLAAKNLSDAILLSDILRVNTEITKAPLSASMIKRYDEHHQDLTLLKALVRQQLPEKYKEIFFDQSKNGYAGYIDGGASQEEFYKFIKPILEKMDGTEELLVKLNREDLLRKQRTFDNGSIPHQIHLGELHAILRRQEDFYPFLKDNREKIEKILTFRIPYYVGPLARGNSRFAWMTRKSEETITPWNFEEVVDKGASAQSFIERMTNFDKNLPNEKVLPKHSLLYEYFTVYNELTKVKYVTEGMRKPAFLSGEQKKAIVDLLFKTNRKVTVKQLKEDYFKKIECFDSVEISGVEDRFNASLGTYHDLLKIIKDKDFLDNEENEDILEDIVLTLTLFEDREMIEERLKTYAHLFDDKVMKQLKRRRYTGWGRLSRKLINGIRDKQSGKTILDFLKSDGFANRNFMQLIHDDSLTFKEDIQKAQVSGQGDSLHEHIANLAGSPAIKKGILQTVKVVDELVKVMGRHKPENIVIEMARENQTTQKGQKNSRERMKRIEEGIKELGSQILKEHPVENTQLQNEKLYLYYLQNGRDMYVDQELDINRLSDYDVDHIVPQSFLKDDSIDNKVLTRSDKARGKSDNVPSEEVVKKMKNYWRQLLNAKLITQRKFDNLTKAERGGLSELDKAGFIKRQLVETRQITKHVAQILDSRMNTKYDENDKLIREVKVITLKSKLVSDFRKDFQFYKVREINNYHHAHDAYLNAVVGTALIKKYPKLESEFVYGDYKVYDVRKMIAKSEQEIGKATAKYFFYSNIMNFFKTEITLANGEIRKRPLIETNGETGEIVWDKGRDFATVRKVLSMPQVNIVKKTEVQTGGFSKESILPKRNSDKLIARKKDWDPKKYGGFDSPTVAYSVLVVAKVEKGKSKKLKSVKELLGITIMERSSFEKNPIDFLEAKGYKEVKKDLIIKLPKYSLFELENGRKRMLASAGELQKGNELALPSKYVNFLYLASHYEKLKGSPEDNEQKQLFVEQHKHYLDEIIEQISEFSKRVILADANLDKVLSAYNKHRDKPIREQAENIIHLFTLTNLGAPAAFKYFDTTIDRKRYTSTKEVLDATLIHQSITGLYETRIDLSQLGGDGGGGGEAAAKPAPGGTLGIEDEYRLHETSTEPDVSLGSTWLSDFPQAWAETGGMGLAVRQAPLIIPLKATSTPVSIQQYPMSHEARLGIKPHIQRLLDQGILVPCQSPWNTPLLPVKKPGTNDYRPVQDLREVNKRVEDIHPTVPNPYNLLSGLPPSHQWYTVLDLKDAFFCLRLHPTSQPLFAFEWRDPGMGISGQLTWTRLPQGFKNSPTLFDEALHRDLADFRIQHPDLILLQYVDDILLAATSELDCQQGTRALLQTLGDLGYRASAKKAQICQKQVKYLGYLLREGQRWLTEARKETVMGQPVPKTPRQLREFLGTAGFCRLWIPGFAEMAAPLYPLTKTGTLFSWGPDQQKAYQEIKQALLTAPALGLPDLTKPFELFVDEKQGYAKGVLTQKLGPWRRPVAYLSKKLDPVAAGWPPCLRMVAAIAVLTKDAGKLTMGQPLVILAPHAVEALVKQPPDRWLSNARMTHYQAMLLDTDRVQFGPVVALNPATLLPLPEEGAPHDCLEILAETHGTRPDLTDQPIPDADHTWYTDGSSFLQEGQRKAGAAVTTETEVIWAGALPAGTSAQRAELIALTQALKMAEGKRLNVYTDSRYAFATAHIHGEIYRRRGLLTSEGREIKNKSEILALLKALFLPKRLSIIHCLGHQKGDSAEARGNRLADQAAREAAIKTPPDTSTLLAGKRTADGSEFEKRTADGSEFESPKKKAKVE

SEQ ID NO: 7453 - protein, 2096 aa, synthetic construct
MPAAKRVKLDGGDKKYSIGLDIGTNSVGWAVITDEYKVPSKKFKVLGNTDRHSIKKNLIGALLFDSGETAEATRLKRTARRRYTRRKNRICYLQEIFSNEMAKVDDSFFHRLEESFLVEEDKKHERHPIFGNIVDEVAYHEKYPTIYHLRKKLVDSTDKADLRLIYLALAHMIKFRGHFLIEGDLNPDNSDVDKLFIQLVQTYNQLFEENPINASGVDAKAILSARLSKSRRLENLIAQLPGEKKNGLFGNLIALSLGLTPNFKSNFDLAEDAKLQLSKDTYDDDLDNLLAQIGDQYADLFLAAKNLSDAILLSDILRVNTEITKAPLSASMIKRYDEHHQDLTLLKALVRQQLPEKYKEIFFDQSKNGYAGYIDGGASQEEFYKFIKPILEKMDGTEELLVKLNREDLLRKQRTFDNGSIPHQIHLGELHAILRRQEDFYPFLKDNREKIEKILTFRIPYYVGPLARGNSRFAWMTRKSEETITPWNFEEVVDKGASAQSFIERMTNFDKNLPNEKVLPKHSLLYEYFTVYNELTKVKYVTEGMRKPAFLSGEQKKAIVDLLFKTNRKVTVKQLKEDYFKKIECFDSVEISGVEDRFNASLGTYHDLLKIIKDKDFLDNEENEDILEDIVLTLTLFEDREMIEERLKTYAHLFDDKVMKQLKRRRYTGWGRLSRKLINGIRDKQSGKTILDFLKSDGFANRNFMQLIHDDSLTFKEDIQKAQVSGQGDSLHEHIANLAGSPAIKKGILQTVKVVDELVKVMGRHKPENIVIEMARENQTTQKGQKNSRERMKRIEEGIKELGSQILKEHPVENTQLQNEKLYLYYLQNGRDMYVDQELDINRLSDYDVDHIVPQSFLKDDSIDNKVLTRSDKARGKSDNVPSEEVVKKMKNYWRQLLNAKLITQRKFDNLTKAERGGLSELDKAGFIKRQLVETRQITKHVAQILDSRMNTKYDENDKLIREVKVITLKSKLVSDFRKDFQFYKVREINNYHHAHDAYLNAVVGTALIKKYPKLESEFVYGDYKVYDVRKMIAKSEQEIGKATAKYFFYSNIMNFFKTEITLANGEIRKRPLIETNGETGEIVWDKGRDFATVRKVLSMPQVNIVKKTEVQTGGFSKESILPKRNSDKLIARKKDWDPKKYGGFDSPTVAYSVLVVAKVEKGKSKKLKSVKELLGITIMERSSFEKNPIDFLEAKGYKEVKKDLIIKLPKYSLFELENGRKRMLASAGELQKGNELALPSKYVNFLYLASHYEKLKGSPEDNEQKQLFVEQHKHYLDEIIEQISEFSKRVILADANLDKVLSAYNKHRDKPIREQAENIIHLFTLTNLGAPAAFKYFDTTIDRKRYTSTKEVLDATLIHQSITGLYETRIDLSQLGGDGGGGGEAAAKPAPGGTLGIEDEYRLHETSTEPDVSLGSTWLSDFPQAWAETGGMGLAVRQAPLIIPLKATSTPVSIQQYPMSHEARLGIKPHIQRLLDQGILVPCQSPWNTPLLPVKKPGTNDYRPVQDLREVNKRVEDIHPTVPNPYNLLSGLPPSHQWYTVLDLKDAFFCLRLHPTSQPLFAFEWRDPGMGISGQLTWTRLPQGFKNSPTLFNEALHRDLADFRIQHPDLILLQYVDDILLAATSELDCQQGTRALLQTLGDLGYRASAKKAQICQKQVKYLGYLLREGQRWLTEARKETVMGQPVPKTPRQLREFLGTAGFCRLWIPGFAEMAAPLYPLTKPGTLFSWGPDQQKAYQEIKQALLTAPALGLPDLTKPFELFVDEKQGYAKGVLTQKLGPWRRPVAYLSKKLDPVAAGWPPCLRMVAAIAVLTKDAGKLTMGQPLVILAPHAVEALVKQPPDRWLSNARMTHYQAMLLDTDRVQFGPVVALNPATLLPLPEEGAPHDCLEILAETHGTRPDLTDQPIPDADHTWYTDGSSFLQEGQRKAGAAVTTETEVIWAGALPAGTSAQRAELIALTQALKMAEGKRLNVYTDSRYAFATAHIHGEIYRRRGWLTSEGREIKNKSEILALLKALFLPKRLSIIHCLGHQKGDSAEARGNRLADQAAREAAIKTPPDTSTLLAGKRTADGSEFEKRTADGSEFESPKKKAKVE

SEQ ID NO: 7454 - protein, 2096 aa, synthetic construct
MPAAKRVKLDGGDKKYSIGLDIGTNSVGWAVITDEYKVPSKKFKVLGNTDRHSIKKNLIGALLFDSGETAEATRLKRTARRRYTRRKNRICYLQEIFSNEMAKVDDSFFHRLEESFLVEEDKKHERHPIFGNIVDEVAYHEKYPTIYHLRKKLVDSTDKADLRLIYLALAHMIKFRGHFLIEGDLNPDNSDVDKLFIQLVQTYNQLFEENPINASGVDAKAILSARLSKSRRLENLIAQLPGEKKNGLFGNLIALSLGLTPNFKSNFDLAEDAKLQLSKDTYDDDLDNLLAQIGDQYADLFLAAKNLSDAILLSDILRVNTEITKAPLSASMIKRYDEHHQDLTLLKALVRQQLPEKYKEIFFDQSKNGYAGYIDGGASQEEFYKFIKPILEKMDGTEELLVKLNREDLLRKQRTFDNGSIPHQIHLGELHAILRRQEDFYPFLKDNREKIEKILTFRIPYYVGPLARGNSRFAWMTRKSEETITPWNFEEVVDKGASAQSFIERMTNFDKNLPNEKVLPKHSLLYEYFTVYNELTKVKYVTEGMRKPAFLSGEQKKAIVDLLFKTNRKVTVKQLKEDYFKKIECFDSVEISGVEDRFNASLGTYHDLLKIIKDKDFLDNEENEDILEDIVLTLTLFEDREMIEERLKTYAHLFDDKVMKQLKRRRYTGWGRLSRKLINGIRDKQSGKTILDFLKSDGFANRNFMQLIHDDSLTFKEDIQKAQVSGQGDSLHEHIANLAGSPAIKKGILQTVKVVDELVKVMGRHKPENIVIEMARENQTTQKGQKNSRERMKRIEEGIKELGSQILKEHPVENTQLQNEKLYLYYLQNGRDMYVDQELDINRLSDYDVDHIVPQSFLKDDSIDNKVLTRSDKARGKSDNVPSEEVVKKMKNYWRQLLNAKLITQRKFDNLTKAERGGLSELDKAGFIKRQLVETRQITKHVAQILDSRMNTKYDENDKLIREVKVITLKSKLVSDFRKDFQFYKVREINNYHHAHDAYLNAVVGTALIKKYPKLESEFVYGDYKVYDVRKMIAKSEQEIGKATAKYFFYSNIMNFFKTEITLANGEIRKRPLIETNGETGEIVWDKGRDFATVRKVLSMPQVNIVKKTEVQTGGFSKESILPKRNSDKLIARKKDWDPKKYGGFDSPTVAYSVLVVAKVEKGKSKKLKSVKELLGITIMERSSFEKNPIDFLEAKGYKEVKKDLIIKLPKYSLFELENGRKRMLASAGELQKGNELALPSKYVNFLYLASHYEKLKGSPEDNEQKQLFVEQHKHYLDEIIEQISEFSKRVILADANLDKVLSAYNKHRDKPIREQAENIIHLFTLTNLGAPAAFKYFDTTIDRKRYTSTKEVLDATLIHQSITGLYETRIDLSQLGGDGGGGGEAAAKPAPGGTLNIEDEYRLHETSKGPDVPLGSTWLSDFPQAWAETGGMGLAVRQAPLIIPLKATSTPVSIKQYPMSQEARLGIKPHIQRLLDQGILVPCQSPWNTPLLPVKKPGTNDYRPVQDLREVNKRVEDIHPTVPNPYNLLSGLPPSHQWYTVLDLKDAFFCLRLHPTSQSLFAFEWRDPEMGISGQLTWTRLPQGFKNSPTLFNEALHRDLADFRIQHPDLILLQYVDDLLLAATSELDCQQGTRALLQTLGDLGYRASAKKAQICQKQVKYLGYLLKEGQRWLTEARKETVMGQPTPKTPRQLREFLGTAGFCRLWIPGFAEMAAPLYPLTKPGTLFEWGPDQQKAYQEIKQALLTAPALGLPDLTKPFELFVDEKQGYAKGVLTQKLGPWRRPVAYLSKKLDPVAAGWPPCLRMVAAIAVLTKDAGKLTMGQPLVILAPHAVEALVKQPPDRWLSNARMTHYQALLLDTDRVQFGPIVALNPATLLPLPEEGLQHDCLDILAEAHGTRPDLTDQPLPDADHTWYTDGSSFLQEGQRKAGAAVTTETEVVWAKALPAGTSAQRAELIALTQALKMAEGKKLNVYTDSRYAFATAHIHGEIYRRRGWLTSEGKEIKNKDEILALLKALFLPKRLSIIHCPGHQKGNRAEARGNRMADQAAREVATRETPETSTLLAGKRTADGSEFEKRTADGSEFESPKKKAKVE

SEQ ID NO: 7455 - protein, 2096 aa, synthetic construct
MPAAKRVKLDGGDKKYSIGLDIGTNSVGWAVITDEYKVPSKKFKVLGNTDRHSIKKNLIGALLFDSGETAEATRLKRTARRRYTRRKNRICYLQEIFSNEMAKVDDSFFHRLEESFLVEEDKKHERHPIFGNIVDEVAYHEKYPTIYHLRKKLVDSTDKADLRLIYLALAHMIKFRGHFLIEGDLNPDNSDVDKLFIQLVQTYNQLFEENPINASGVDAKAILSARLSKSRRLENLIAQLPGEKKNGLFGNLIALSLGLTPNFKSNFDLAEDAKLQLSKDTYDDDLDNLLAQIGDQYADLFLAAKNLSDAILLSDILRVNTEITKAPLSASMIKRYDEHHQDLTLLKALVRQQLPEKYKEIFFDQSKNGYAGYIDGGASQEEFYKFIKPILEKMDGTEELLVKLNREDLLRKQRTFDNGSIPHQIHLGELHAILRRQEDFYPFLKDNREKIEKILTFRIPYYVGPLARGNSRFAWMTRKSEETITPWNFEEVVDKGASAQSFIERMTNFDKNLPNEKVLPKHSLLYEYFTVYNELTKVKYVTEGMRKPAFLSGEQKKAIVDLLFKTNRKVTVKQLKEDYFKKIECFDSVEISGVEDRFNASLGTYHDLLKIIKDKDFLDNEENEDILEDIVLTLTLFEDREMIEERLKTYAHLFDDKVMKQLKRRRYTGWGRLSRKLINGIRDKQSGKTILDFLKSDGFANRNFMQLIHDDSLTFKEDIQKAQVSGQGDSLHEHIANLAGSPAIKKGILQTVKVVDELVKVMGRHKPENIVIEMARENQTTQKGQKNSRERMKRIEEGIKELGSQILKEHPVENTQLQNEKLYLYYLQNGRDMYVDQELDINRLSDYDVDHIVPQSFLKDDSIDNKVLTRSDKARGKSDNVPSEEVVKKMKNYWRQLLNAKLITQRKFDNLTKAERGGLSELDKAGFIKRQLVETRQITKHVAQILDSRMNTKYDENDKLIREVKVITLKSKLVSDFRKDFQFYKVREINNYHHAHDAYLNAVVGTALIKKYPKLESEFVYGDYKVYDVRKMIAKSEQEIGKATAKYFFYSNIMNFFKTEITLANGEIRKRPLIETNGETGEIVWDKGRDFATVRKVLSMPQVNIVKKTEVQTGGFSKESILPKRNSDKLIARKKDWDPKKYGGFDSPTVAYSVLVVAKVEKGKSKKLKSVKELLGITIMERSSFEKNPIDFLEAKGYKEVKKDLIIKLPKYSLFELENGRKRMLASAGELQKGNELALPSKYVNFLYLASHYEKLKGSPEDNEQKQLFVEQHKHYLDEIIEQISEFSKRVILADANLDKVLSAYNKHRDKPIREQAENIIHLFTLTNLGAPAAFKYFDTTIDRKRYTSTKEVLDATLIHQSITGLYETRIDLSQLGGDGGGGGEAAAKPAPGGTLNIEDEHRLHETSKEPDVSLGSTWLSDFPQAWAETGGMGLAVRQAPLIIPLKATSTPVSIKQYPMSQEARLGIKPHIQRLLDQGILVPCQSPWNTPLLPVKKPGTNDYRPVQDLREVNKRVEDIHPTVPNPYNLLSGLPPSHQWYTVLDLKDAFFCLRLHPTSQPLFAFEWRDPEMGISGQLTWTRLPQGFKNSPTLFDEALHRDLADFRIQHPDLILLQYVDDLLLAATSELDCQQGTRALLQTLGNLGYRASAKKAQICQKQVKYLGYLLKEGQRWLTEARKETVMGQPTPKTPRQLREFLGTAGFCRLWIPGFAEMAAPLYPLTKTGTLFNWGPDQQKAYQEIKQALLTAPALGLPDLTKPFELFVDEKQGYAKGVLTQKLGPWRRPVAYLSKKLDPVAAGWPPCLRMVAAIAVLTKDAGKLTMGQPLVILAPHAVEALVKQPPDRWLSNARMTHYQALLLDTDRVQFGPVVALNPATLLPLPEEGLQHNCLDILAEAHGTRPDLTDQPLPDADHTWYTDGSSLLQEGQRKAGAAVTTETEVIWAKALPAGTSAQRAELIALTQALKMAEGKKLNVYTDSRYAFATAHIHGEIYRRRGLLTSEGKEIKNKDEILALLKALFLPKRLSIIHCPGHQKGHSAEARGNRMADQAARKAAITETPDTSTLLAGKRTADGSEFEKRTADGSEFESPKKKAKVE

SEQ ID NO: 7456 - protein, 2087 aa, synthetic construct
MPAAKRVKLDGGDKKYSIGLDIGTNSVGWAVITDEYKVPSKKFKVLGNTDRHSIKKNLIGALLFDSGETAEATRLKRTARRRYTRRKNRICYLQEIFSNEMAKVDDSFFHRLEESFLVEEDKKHERHPIFGNIVDEVAYHEKYPTIYHLRKKLVDSTDKADLRLIYLALAHMIKFRGHFLIEGDLNPDNSDVDKLFIQLVQTYNQLFEENPINASGVDAKAILSARLSKSRRLENLIAQLPGEKKNGLFGNLIALSLGLTPNFKSNFDLAEDAKLQLSKDTYDDDLDNLLAQIGDQYADLFLAAKNLSDAILLSDILRVNTEITKAPLSASMIKRYDEHHQDLTLLKALVRQQLPEKYKEIFFDQSKNGYAGYIDGGASQEEFYKFIKPILEKMDGTEELLVKLNREDLLRKQRTFDNGSIPHQIHLGELHAILRRQEDFYPFLKDNREKIEKILTFRIPYYVGPLARGNSRFAWMTRKSEETITPWNFEEVVDKGASAQSFIERMTNFDKNLPNEKVLPKHSLLYEYFTVYNELTKVKYVTEGMRKPAFLSGEQKKAIVDLLFKTNRKVTVKQLKEDYFKKIECFDSVEISGVEDRFNASLGTYHDLLKIIKDKDFLDNEENEDILEDIVLTLTLFEDREMIEERLKTYAHLFDDKVMKQLKRRRYTGWGRLSRKLINGIRDKQSGKTILDFLKSDGFANRNFMQLIHDDSLTFKEDIQKAQVSGQGDSLHEHIANLAGSPAIKKGILQTVKVVDELVKVMGRHKPENIVIEMARENQTTQKGQKNSRERMKRIEEGIKELGSQILKEHPVENTQLQNEKLYLYYLQNGRDMYVDQELDINRLSDYDVDHIVPQSFLKDDSIDNKVLTRSDKARGKSDNVPSEEVVKKMKNYWRQLLNAKLITQRKFDNLTKAERGGLSELDKAGFIKRQLVETRQITKHVAQILDSRMNTKYDENDKLIREVKVITLKSKLVSDFRKDFQFYKVREINNYHHAHDAYLNAVVGTALIKKYPKLESEFVYGDYKVYDVRKMIAKSEQEIGKATAKYFFYSNIMNFFKTEITLANGEIRKRPLIETNGETGEIVWDKGRDFATVRKVLSMPQVNIVKKTEVQTGGFSKESILPKRNSDKLIARKKDWDPKKYGGFDSPTVAYSVLVVAKVEKGKSKKLKSVKELLGITIMERSSFEKNPIDFLEAKGYKEVKKDLIIKLPKYSLFELENGRKRMLASAGELQKGNELALPSKYVNFLYLASHYEKLKGSPEDNEQKQLFVEQHKHYLDEIIEQISEFSKRVILADANLDKVLSAYNKHRDKPIREQAENIIHLFTLTNLGAPAAFKYFDTTIDRKRYTSTKEVLDATLIHQSITGLYETRIDLSQLGGDGGGGGEAAAKPAPGGVPWLMKKPLQLTVLVPLHEYQERLLQQTALPKEQKELLQKLFLKYDALWQHWENQVGHRRIKPHNIATGTLAPRPQKQYPINPKAKPSIQIVIDDLLKQGVLIQQNSTMNTPVYPVPKPDGKWRMVLDYREVNKTIPLIAAQNQHSAGILSSIYRGKYKTTLDLTNGFWAHPITPESYWLTAFTWQGKQYCWTRLPQGFLNSPALFNADVVDLLKEIPNVQAYVDDIYISHDDPQEHLEQLEKIFSILLNAGYVVSLKKSEIAQREVEFLGFNITKEGRGLTDTFKQKLLNITPPKDLKQLQSILGKLNFARNFIPNYSELVKPLYTIVAPANGKFISWTEDNSNQLQHIISVLNQADNLEERNPETRLIIKVNSSPSAGYIRYYNEGSKRPIMYVNYIFSKAEAKFTQTEKLLTTMHKGLIKAMDLAMGQEILVYSPIVSMTKIQRTPLPERKALPVRWITWMTYLEDPRIQFHYDKSLPELQQIPNVTEDVIAKTKHPSEFAMVFYTDGSAIKHPDVNKSHSAGMGIAQVQFIPEYKIVHQWSIPLGDHTAQLAEIAAVEFACKKALKISGPVLIVTDSFYVAESANKELPYWKSNGFLNNKKKPLRHVSKWKSIAECLQLKPDIIIMHEKGHQQPMTTLHTEGNNLADKLATQGSYVVHAGKRTADGSEFEKRTADGSEFESPKKKAKVE

SEQ ID NO: 7457 - protein, 2087 aa, synthetic construct
MPAAKRVKLDGGDKKYSIGLDIGTNSVGWAVITDEYKVPSKKFKVLGNTDRHSIKKNLIGALLFDSGETAEATRLKRTARRRYTRRKNRICYLQEIFSNEMAKVDDSFFHRLEESFLVEEDKKHERHPIFGNIVDEVAYHEKYPTIYHLRKKLVDSTDKADLRLIYLALAHMIKFRGHFLIEGDLNPDNSDVDKLFIQLVQTYNQLFEENPINASGVDAKAILSARLSKSRRLENLIAQLPGEKKNGLFGNLIALSLGLTPNFKSNFDLAEDAKLQLSKDTYDDDLDNLLAQIGDQYADLFLAAKNLSDAILLSDILRVNTEITKAPLSASMIKRYDEHHQDLTLLKALVRQQLPEKYKEIFFDQSKNGYAGYIDGGASQEEFYKFIKPILEKMDGTEELLVKLNREDLLRKQRTFDNGSIPHQIHLGELHAILRRQEDFYPFLKDNREKIEKILTFRIPYYVGPLARGNSRFAWMTRKSEETITPWNFEEVVDKGASAQSFIERMTNFDKNLPNEKVLPKHSLLYEYFTVYNELTKVKYVTEGMRKPAFLSGEQKKAIVDLLFKTNRKVTVKQLKEDYFKKIECFDSVEISGVEDRFNASLGTYHDLLKIIKDKDFLDNEENEDILEDIVLTLTLFEDREMIEERLKTYAHLFDDKVMKQLKRRRYTGWGRLSRKLINGIRDKQSGKTILDFLKSDGFANRNFMQLIHDDSLTFKEDIQKAQVSGQGDSLHEHIANLAGSPAIKKGILQTVKVVDELVKVMGRHKPENIVIEMARENQTTQKGQKNSRERMKRIEEGIKELGSQILKEHPVENTQLQNEKLYLYYLQNGRDMYVDQELDINRLSDYDVDHIVPQSFLKDDSIDNKVLTRSDKARGKSDNVPSEEVVKKMKNYWRQLLNAKLITQRKFDNLTKAERGGLSELDKAGFIKRQLVETRQITKHVAQILDSRMNTKYDENDKLIREVKVITLKSKLVSDFRKDFQFYKVREINNYHHAHDAYLNAVVGTALIKKYPKLESEFVYGDYKVYDVRKMIAKSEQEIGKATAKYFFYSNIMNFFKTEITLANGEIRKRPLIETNGETGEIVWDKGRDFATVRKVLSMPQVNIVKKTEVQTGGFSKESILPKRNSDKLIARKKDWDPKKYGGFDSPTVAYSVLVVAKVEKGKSKKLKSVKELLGITIMERSSFEKNPIDFLEAKGYKEVKKDLIIKLPKYSLFELENGRKRMLASAGELQKGNELALPSKYVNFLYLASHYEKLKGSPEDNEQKQLFVEQHKHYLDEIIEQISEFSKRVILADANLDKVLSAYNKHRDKPIREQAENIIHLFTLTNLGAPAAFKYFDTTIDRKRYTSTKEVLDATLIHQSITGLYETRIDLSQLGGDGGGGGEAAAKPAPGGIPWLMKKPLQLTTLVPLQEYEERLLKQTMLTGSYKEKLQSLFLKYDALWQHWENQVGHRRIKPHHIATGTVNPRPQKQYPINPKAKASIQTVINDLLKQGVLIQQNSIMNTPVYPVPKPDGKWRMVLDYREVNKTIPLIAAQNQHSAGILSSIFRGKYKTTLDLSNGFWAHSITPESYWLTAFTWLGQQYCWTRLPQGFLNSPALFNADVVDLLKEVPNVQVYVDDIYISHDDPREHLEQLEKVFSLLLNAGYVVSLKKSEIAQHEVEFLGFNITKEGRGLTETFKQKLLNITPPRDLKQLQSILGLLNFARNFIPNFSELVKPLYNIIATAPGKYITWTTDNSQQLQNIISMLNSAENLEERNPEVRLIMKVNTSPSAGYIRFYNEFAKRPIMYLNYVYTKAEVKFTNTEKLLTTIHKGLIKALDLGMGQEILVYSPIVSMTKIQKTPLPERKALPIRWITWMSYLEDPRIQFHYDKTLPELQQVPTVTDDIIAKIKHPSEFSMVFYTDGSAIKHPNVNKSHNAGMGIAQVQFKPEFTVINTWSIPLGDHTAQLAEVAAVEFACKKALKIDGPVLIVTDSFYVAESVNKELPYWQSNGFFNNKKKPLKHVSKWKSIADCIQLKPDIIIIHEKGHQPTASTFHTEGNNLADKLATQGSYVVNAGKRTADGSEFEKRTADGSEFESPKKKAKVE

SEQ ID NO: 7458 - protein, 2176 aa, synthetic construct
MPAAKRVKLDGGDKKYSIGLDIGTNSVGWAVITDEYKVPSKKFKVLGNTDRHSIKKNLIGALLFDSGETAEATRLKRTARRRYTRRKNRICYLQEIFSNEMAKVDDSFFHRLEESFLVEEDKKHERHPIFGNIVDEVAYHEKYPTIYHLRKKLVDSTDKADLRLIYLALAHMIKFRGHFLIEGDLNPDNSDVDKLFIQLVQTYNQLFEENPINASGVDAKAILSARLSKSRRLENLIAQLPGEKKNGLFGNLIALSLGLTPNFKSNFDLAEDAKLQLSKDTYDDDLDNLLAQIGDQYADLFLAAKNLSDAILLSDILRVNTEITKAPLSASMIKRYDEHHQDLTLLKALVRQQLPEKYKEIFFDQSKNGYAGYIDGGASQEEFYKFIKPILEKMDGTEELLVKLNREDLLRKQRTFDNGSIPHQIHLGELHAILRRQEDFYPFLKDNREKIEKILTFRIPYYVGPLARGNSRFAWMTRKSEETITPWNFEEVVDKGASAQSFIERMTNFDKNLPNEKVLPKHSLLYEYFTVYNELTKVKYVTEGMRKPAFLSGEQKKAIVDLLFKTNRKVTVKQLKEDYFKKIECFDSVEISGVEDRFNASLGTYHDLLKIIKDKDFLDNEENEDILEDIVLTLTLFEDREMIEERLKTYAHLFDDKVMKQLKRRRYTGWGRLSRKLINGIRDKQSGKTILDFLKSDGFANRNFMQLIHDDSLTFKEDIQKAQVSGQGDSLHEHIANLAGSPAIKKGILQTVKVVDELVKVMGRHKPENIVIEMARENQTTQKGQKNSRERMKRIEEGIKELGSQILKEHPVENTQLQNEKLYLYYLQNGRDMYVDQELDINRLSDYDVDHIVPQSFLKDDSIDNKVLTRSDKARGKSDNVPSEEVVKKMKNYWRQLLNAKLITQRKFDNLTKAERGGLSELDKAGFIKRQLVETRQITKHVAQILDSRMNTKYDENDKLIREVKVITLKSKLVSDFRKDFQFYKVREINNYHHAHDAYLNAVVGTALIKKYPKLESEFVYGDYKVYDVRKMIAKSEQEIGKATAKYFFYSNIMNFFKTEITLANGEIRKRPLIETNGETGEIVWDKGRDFATVRKVLSMPQVNIVKKTEVQTGGFSKESILPKRNSDKLIARKKDWDPKKYGGFDSPTVAYSVLVVAKVEKGKSKKLKSVKELLGITIMERSSFEKNPIDFLEAKGYKEVKKDLIIKLPKYSLFELENGRKRMLASAGELQKGNELALPSKYVNFLYLASHYEKLKGSPEDNEQKQLFVEQHKHYLDEIIEQISEFSKRVILADANLDKVLSAYNKHRDKPIREQAENIIHLFTLTNLGAPAAFKYFDTTIDRKRYTSTKEVLDATLIHQSITGLYETRIDLSQLGGDGGGGGEAAAKPAPGGMDPLQLLQPLEAEIKGTKLKAHWNSGATITCVPQAFLEEEVPIKNIWIKTIHGEKEQPVYYLTFKIQGRKVEAEVISSPYDYILVSPSDIPWLMKKPLQLTTLVPLQEYEERLLKQTMLTGSYKEKLQSLFLKYDALWQHWENQVGHRRIKPHHIATGTVNPRPQKQYPINPKAKASIQTVINDLLKQGVLIQQNSIMNTPVYPVPKPDGKWRMVLDYREVNKTIPLIAAQNQHSAGILSSIFRGKYKTTLDLSNGFWAHSITPESYWLTAFTWLGQQYCWTRLPQGFLNSPALFNADVVDLLKEVPNVQVYVDDIYISHDDPREHLEQLEKVFSLLLNAGYVVSLKKSEIAQHEVEFLGFNITKEGRGLTETFKQKLLNITPPRDLKQLQSILGKLNFARNFIPNFSELVKPLYNIIATAPGKYITWTTDNSQQLQNIISMLNSAENLEERNPEVRLIMKVNTSPSAGYIRFYNEFAKRPIMYLNYVYTKAEVKFTNTEKLLTTIHKGLIKALDLGMGQEILVYSPIVSMTKIQKTPLPERKALPIRWITWMSYLEDPRIQFHYDKTLPELQQVPTVTDDIIAKIKHPSEFSMVFYTDGSAIKHPNVNKSHNAGMGIAQVQFKPEFTVINTWSIPLGDHTAQLAEVAAVEFACKKALKIDGPVLIVTDSFYVAESVNKELPYWQSNGFFNNKKKPLKHVSKWKSIADCIQLKPDIIIIHEKGHQPTASTFHTEGNNLADKLATQGSYVVNAGKRTADGSEFEKRTADGSEFESPKKKAKVE

SEQ ID NO: 7459 - protein, 2094 aa, synthetic construct
MPAAKRVKLDGGDKKYSIGLDIGTNSVGWAVITDEYKVPSKKFKVLGNTDRHSIKKNLIGALLFDSGETAEATRLKRTARRRYTRRKNRICYLQEIFSNEMAKVDDSFFHRLEESFLVEEDKKHERHPIFGNIVDEVAYHEKYPTIYHLRKKLVDSTDKADLRLIYLALAHMIKFRGHFLIEGDLNPDNSDVDKLFIQLVQTYNQLFEENPINASGVDAKAILSARLSKSRRLENLIAQLPGEKKNGLFGNLIALSLGLTPNFKSNFDLAEDAKLQLSKDTYDDDLDNLLAQIGDQYADLFLAAKNLSDAILLSDILRVNTEITKAPLSASMIKRYDEHHQDLTLLKALVRQQLPEKYKEIFFDQSKNGYAGYIDGGASQEEFYKFIKPILEKMDGTEELLVKLNREDLLRKQRTFDNGSIPHQIHLGELHAILRRQEDFYPFLKDNREKIEKILTFRIPYYVGPLARGNSRFAWMTRKSEETITPWNFEEVVDKGASAQSFIERMTNFDKNLPNEKVLPKHSLLYEYFTVYNELTKVKYVTEGMRKPAFLSGEQKKAIVDLLFKTNRKVTVKQLKEDYFKKIECFDSVEISGVEDRFNASLGTYHDLLKIIKDKDFLDNEENEDILEDIVLTLTLFEDREMIEERLKTYAHLFDDKVMKQLKRRRYTGWGRLSRKLINGIRDKQSGKTILDFLKSDGFANRNFMQLIHDDSLTFKEDIQKAQVSGQGDSLHEHIANLAGSPAIKKGILQTVKVVDELVKVMGRHKPENIVIEMARENQTTQKGQKNSRERMKRIEEGIKELGSQILKEHPVENTQLQNEKLYLYYLQNGRDMYVDQELDINRLSDYDVDHIVPQSFLKDDSIDNKVLTRSDKARGKSDNVPSEEVVKKMKNYWRQLLNAKLITQRKFDNLTKAERGGLSELDKAGFIKRQLVETRQITKHVAQILDSRMNTKYDENDKLIREVKVITLKSKLVSDFRKDFQFYKVREINNYHHAHDAYLNAVVGTALIKKYPKLESEFVYGDYKVYDVRKMIAKSEQEIGKATAKYFFYSNIMNFFKTEITLANGEIRKRPLIETNGETGEIVWDKGRDFATVRKVLSMPQVNIVKKTEVQTGGFSKESILPKRNSDKLIARKKDWDPKKYGGFDSPTVAYSVLVVAKVEKGKSKKLKSVKELLGITIMERSSFEKNPIDFLEAKGYKEVKKDLIIKLPKYSLFELENGRKRMLASAGELQKGNELALPSKYVNFLYLASHYEKLKGSPEDNEQKQLFVEQHKHYLDEIIEQISEFSKRVILADANLDKVLSAYNKHRDKPIREQAENIIHLFTLTNLGAPAAFKYFDTTIDRKRYTSTKEVLDATLIHQSITGLYETRIDLSQLGGDGGGGGEAAAKPAPGGVLNLEEEYRLHEKPVPSSIDPSWLQLFPTVWAERAGMGLANQVPPVVVELRSGASPVAVRQYPMSKEAREGIRPHIQRFLDLGVLVPCQSPWNTPLLPVKKPGTNDYRPVQDLREINKRVQDIHPTVPNPYNLLSSLPPSHTWYSVLDLKDAFFCLKLHPNSQPLFAFEWRDPEKGNTGQLTWTRLPQGFKNSPTLFNEALHRDLAPFRALNPQVVLLQYVDDLLVAAPTYRDCKEGTQKLLQELSKLGYRVSAKKAQLCQKEVTYLGYLLKEGKRWLTPARKATVMKIPPPTTPRQVREFLGTAGFCRLWIPGFASLAAPLYPLTKPSIPFIWTEEHQKAFDRIKEALLSAPALALPDLTKPFTLYVDERAGVARGVLTQTLGPWRRPVAYLSKKLDPVASGWPTCLKAVAAVALLLKDADKLTLGQNVTVIASHSLESIVRQPPDRWMTNARMTHYQSLLLNERVSFAPPAVLNPATLLPVESEATPVHRCSEILAEETGTRRDLKDQPLPGVPAWYTDGSSFIAEGKRRAGAAIVDGKRTVWASSLPEGTSAQKAELVALTQALRLAEGKDINIYTDSRYAFATAHIHGAIYKQRGWLTSAGKDIKNKEEILALLEAIHLPKRVAIIHCPGHQKGNDPVATGNRRADEAAKQAALSTRVLAETTKPAGKRTADGSEFEKRTADGSEFESPKKKAKVE

SEQ ID NO: 7460 - protein, 2096 aa, synthetic construct
MPAAKRVKLDGGDKKYSIGLDIGTNSVGWAVITDEYKVPSKKFKVLGNTDRHSIKKNLIGALLFDSGETAEATRLKRTARRRYTRRKNRICYLQEIFSNEMAKVDDSFFHRLEESFLVEEDKKHERHPIFGNIVDEVAYHEKYPTIYHLRKKLVDSTDKADLRLIYLALAHMIKFRGHFLIEGDLNPDNSDVDKLFIQLVQTYNQLFEENPINASGVDAKAILSARLSKSRRLENLIAQLPGEKKNGLFGNLIALSLGLTPNFKSNFDLAEDAKLQLSKDTYDDDLDNLLAQIGDQYADLFLAAKNLSDAILLSDILRVNTEITKAPLSASMIKRYDEHHQDLTLLKALVRQQLPEKYKEIFFDQSKNGYAGYIDGGASQEEFYKFIKPILEKMDGTEELLVKLNREDLLRKQRTFDNGSIPHQIHLGELHAILRRQEDFYPFLKDNREKIEKILTFRIPYYVGPLARGNSRFAWMTRKSEETITPWNFEEVVDKGASAQSFIERMTNFDKNLPNEKVLPKHSLLYEYFTVYNELTKVKYVTEGMRKPAFLSGEQKKAIVDLLFKTNRKVTVKQLKEDYFKKIECFDSVEISGVEDRFNASLGTYHDLLKIIKDKDFLDNEENEDILEDIVLTLTLFEDREMIEERLKTYAHLFDDKVMKQLKRRRYTGWGRLSRKLINGIRDKQSGKTILDFLKSDGFANRNFMQLIHDDSLTFKEDIQKAQVSGQGDSLHEHIANLAGSPAIKKGILQTVKVVDELVKVMGRHKPENIVIEMARENQTTQKGQKNSRERMKRIEEGIKELGSQILKEHPVENTQLQNEKLYLYYLQNGRDMYVDQELDINRLSDYDVDHIVPQSFLKDDSIDNKVLTRSDKARGKSDNVPSEEVVKKMKNYWRQLLNAKLITQRKFDNLTKAERGGLSELDKAGFIKRQLVETRQITKHVAQILDSRMNTKYDENDKLIREVKVITLKSKLVSDFRKDFQFYKVREINNYHHAHDAYLNAVVGTALIKKYPKLESEFVYGDYKVYDVRKMIAKSEQEIGKATAKYFFYSNIMNFFKTEITLANGEIRKRPLIETNGETGEIVWDKGRDFATVRKVLSMPQVNIVKKTEVQTGGFSKESILPKRNSDKLIARKKDWDPKKYGGFDSPTVAYSVLVVAKVEKGKSKKLKSVKELLGITIMERSSFEKNPIDFLEAKGYKEVKKDLIIKLPKYSLFELENGRKRMLASAGELQKGNELALPSKYVNFLYLASHYEKLKGSPEDNEQKQLFVEQHKHYLDEIIEQISEFSKRVILADANLDKVLSAYNKHRDKPIREQAENIIHLFTLTNLGAPAAFKYFDTTIDRKRYTSTKEVLDATLIHQSITGLYETRIDLSQLGGDGGGGGEAAAKPAPGGTLNIEDEYRLHETSKEPDVPLGSTWLSDFPQAWAETGGMGLAVRQAPLIIPLKATSTPVSIKQYPMSQEARLGIKPHIQRLLDQGILVPCQSPWNTPLLPVKKPGTNDYRPVQDLREVNKRVEDIHPTVPNPYNLLSGLPPSHQWYTVLDLKDAFFCLRLHPTSQPLFAFEWRDPEMGISGQLTWTRLPQGFKNSPTLFDEALHRDLADFRIQHPDLILLQYVDDLLLAATSEQDCQRGTRALLQTLGNLGYRASAKKAQICQKQVKYLGYLLKEGQRWLTEARKETVMGQPTPKTPRQLREFLGTAGFCRLWIPGFAEMAAPLYPLTKTGTLFNWGPDQQKAYQEIKQALLTAPALGLPDLTKPFELFVDEKQGYAKGVLTQKLGPWRRPVAYLSKKLDPVAAGWPPCLRMVAAIAVLTKDAGKLTMGQPLVILAPHAVEALVKQPPDRWLSNARMTHYQAMLLDTDRVQFGPVVALNPATLLPLPEKEAPHDCLEILAETHGTRPDLTDQPIPDADYTWYTDGSSFLQEGQRRAGAAVTTETEVIWARALPAGTSAQRAELIALTQALKMAEGKKLNVYTDSRYAFATAHVHGEIYRRRGLLTSEGREIKNKNEILALLKALFLPKRLSIIHCPGHQKGNSAEARGNRMADQAAREAAMKAVLETSTLLAGKRTADGSEFEKRTADGSEFESPKKKAKVE

SEQ ID NO: 7461 - protein, 2096 aa, synthetic construct
MPAAKRVKLDGGDKKYSIGLDIGTNSVGWAVITDEYKVPSKKFKVLGNTDRHSIKKNLIGALLFDSGETAEATRLKRTARRRYTRRKNRICYLQEIFSNEMAKVDDSFFHRLEESFLVEEDKKHERHPIFGNIVDEVAYHEKYPTIYHLRKKLVDSTDKADLRLIYLALAHMIKFRGHFLIEGDLNPDNSDVDKLFIQLVQTYNQLFEENPINASGVDAKAILSARLSKSRRLENLIAQLPGEKKNGLFGNLIALSLGLTPNFKSNFDLAEDAKLQLSKDTYDDDLDNLLAQIGDQYADLFLAAKNLSDAILLSDILRVNTEITKAPLSASMIKRYDEHHQDLTLLKALVRQQLPEKYKEIFFDQSKNGYAGYIDGGASQEEFYKFIKPILEKMDGTEELLVKLNREDLLRKQRTFDNGSIPHQIHLGELHAILRRQEDFYPFLKDNREKIEKILTFRIPYYVGPLARGNSRFAWMTRKSEETITPWNFEEVVDKGASAQSFIERMTNFDKNLPNEKVLPKHSLLYEYFTVYNELTKVKYVTEGMRKPAFLSGEQKKAIVDLLFKTNRKVTVKQLKEDYFKKIECFDSVEISGVEDRFNASLGTYHDLLKIIKDKDFLDNEENEDILEDIVLTLTLFEDREMIEERLKTYAHLFDDKVMKQLKRRRYTGWGRLSRKLINGIRDKQSGKTILDFLKSDGFANRNFMQLIHDDSLTFKEDIQKAQVSGQGDSLHEHIANLAGSPAIKKGILQTVKVVDELVKVMGRHKPENIVIEMARENQTTQKGQKNSRERMKRIEEGIKELGSQILKEHPVENTQLQNEKLYLYYLQNGRDMYVDQELDINRLSDYDVDHIVPQSFLKDDSIDNKVLTRSDKARGKSDNVPSEEVVKKMKNYWRQLLNAKLITQRKFDNLTKAERGGLSELDKAGFIKRQLVETRQITKHVAQILDSRMNTKYDENDKLIREVKVITLKSKLVSDFRKDFQFYKVREINNYHHAHDAYLNAVVGTALIKKYPKLESEFVYGDYKVYDVRKMIAKSEQEIGKATAKYFFYSNIMNFFKTEITLANGEIRKRPLIETNGETGEIVWDKGRDFATVRKVLSMPQVNIVKKTEVQTGGFSKESILPKRNSDKLIARKKDWDPKKYGGFDSPTVAYSVLVVAKVEKGKSKKLKSVKELLGITIMERSSFEKNPIDFLEAKGYKEVKKDLIIKLPKYSLFELENGRKRMLASAGELQKGNELALPSKYVNFLYLASHYEKLKGSPEDNEQKQLFVEQHKHYLDEIIEQISEFSKRVILADANLDKVLSAYNKHRDKPIREQAENIIHLFTLTNLGAPAAFKYFDTTIDRKRYTSTKEVLDATLIHQSITGLYETRIDLSQLGGDGGGGGEAAAKPAPGGTLNIEDEYRLHETSKEPDVPLGSTWLSDFPQAWAETGGMGLAVRQAPLIIPLKATSTPVSIKQYPMSQEARLGIKPHIQRLLDQGILVPCQSPWNTPLLPVKKPGTNDYRPVQDLREVNKRVEDIHPTVPNPYNLLSGLPPSHQWYTVLDLKDAFFCLRLHPTSQPLFAFEWRDPEMGISGQLTWTRLPQGFKNSPTLFNEALHRDLADFRIQHPDLILLQYVDDLLLAATSEQDCQRGTRALLQTLGNLGYRASAKKAQICQKQVKYLGYLLKEGQRWLTEARKETVMGQPTPKTPRQLREFLGKAGFCRLFIPGFAEMAAPLYPLTKPGTLFNWGPDQQKAYQEIKQALLTAPALGLPDLTKPFELFVDEKQGYAKGVLTQKLGPWRRPVAYLSKKLDPVAAGWPPCLRMVAAIAVLTKDAGKLTMGQPLVILAPHAVEALVKQPPDRWLSNARMTHYQAMLLDTDRVQFGPVVALNPATLLPLPEKEAPHDCLEILAETHGTRPDLTDQPIPDADYTWYTDGSSFLQEGQRRAGAAVTTETEVIWARALPAGTSAQRAELIALTQALKMAEGKKLNVYTDSRYAFATAHVHGEIYRRRGWLTSEGREIKNKNEILALLKALFLPKRLSIIHCPGHQKGNSAEARGNRMADQAAREAAMKAVLETSTLLAGKRTADGSEFEKRTADGSEFESPKKKAKVE

SEQ ID NO: 7462 - protein, 2098 aa, synthetic construct
MPAAKRVKLDGGDKKYSIGLDIGTNSVGWAVITDEYKVPSKKFKVLGNTDRHSIKKNLIGALLFDSGETAEATRLKRTARRRYTRRKNRICYLQEIFSNEMAKVDDSFFHRLEESFLVEEDKKHERHPIFGNIVDEVAYHEKYPTIYHLRKKLVDSTDKADLRLIYLALAHMIKFRGHFLIEGDLNPDNSDVDKLFIQLVQTYNQLFEENPINASGVDAKAILSARLSKSRRLENLIAQLPGEKKNGLFGNLIALSLGLTPNFKSNFDLAEDAKLQLSKDTYDDDLDNLLAQIGDQYADLFLAAKNLSDAILLSDILRVNTEITKAPLSASMIKRYDEHHQDLTLLKALVRQQLPEKYKEIFFDQSKNGYAGYIDGGASQEEFYKFIKPILEKMDGTEELLVKLNREDLLRKQRTFDNGSIPHQIHLGELHAILRRQEDFYPFLKDNREKIEKILTFRIPYYVGPLARGNSRFAWMTRKSEETITPWNFEEVVDKGASAQSFIERMTNFDKNLPNEKVLPKHSLLYEYFTVYNELTKVKYVTEGMRKPAFLSGEQKKAIVDLLFKTNRKVTVKQLKEDYFKKIECFDSVEISGVEDRFNASLGTYHDLLKIIKDKDFLDNEENEDILEDIVLTLTLFEDREMIEERLKTYAHLFDDKVMKQLKRRRYTGWGRLSRKLINGIRDKQSGKTILDFLKSDGFANRNFMQLIHDDSLTFKEDIQKAQVSGQGDSLHEHIANLAGSPAIKKGILQTVKVVDELVKVMGRHKPENIVIEMARENQTTQKGQKNSRERMKRIEEGIKELGSQILKEHPVENTQLQNEKLYLYYLQNGRDMYVDQELDINRLSDYDVDHIVPQSFLKDDSIDNKVLTRSDKARGKSDNVPSEEVVKKMKNYWRQLLNAKLITQRKFDNLTKAERGGLSELDKAGFIKRQLVETRQITKHVAQILDSRMNTKYDENDKLIREVKVITLKSKLVSDFRKDFQFYKVREINNYHHAHDAYLNAVVGTALIKKYPKLESEFVYGDYKVYDVRKMIAKSEQEIGKATAKYFFYSNIMNFFKTEITLANGEIRKRPLIETNGETGEIVWDKGRDFATVRKVLSMPQVNIVKKTEVQTGGFSKESILPKRNSDKLIARKKDWDPKKYGGFDSPTVAYSVLVVAKVEKGKSKKLKSVKELLGITIMERSSFEKNPIDFLEAKGYKEVKKDLIIKLPKYSLFELENGRKRMLASAGELQKGNELALPSKYVNFLYLASHYEKLKGSPEDNEQKQLFVEQHKHYLDEIIEQISEFSKRVILADANLDKVLSAYNKHRDKPIREQAENIIHLFTLTNLGAPAAFKYFDTTIDRKRYTSTKEVLDATLIHQSITGLYETRIDLSQLGGDGGGGGPAPEAAAKGGTAPLEEEYRLFLEAPIQNVTLLEQWKREIPKVWAEINPPGLASTQAPIHVQLLSTALPVRVRQYPITLEAKRSLRETIRKFRAAGILRPVHSPWNTPLLPVRKSGTSEYRMVQDLREVNKRVETIHPTVPNPYTLLSLLPPDRIWYSVLDLKDAFFCIPLAPESQLIFAFEWADAEEGESGQLTWTRLPQGFKNSPTLFNEALNRDLQGFRLDHPSVSLLQYVDDLLIAADTQAACLSATRDLLMTLAELGYRVSGKKAQLCQEEVTYLGFKIHKGSRSLSNSRTQAILQIPVPKTKRQVREFLGTIGYCRLWIPGFAELAQPLYAATRPGNDPLVWGEKEEEAFQSLKLALTQPPALALPSLDKPFQLFVEETSGAAKGVLTQALGPWKRPVAYLSKRLDPVAAGWPRCLRAIAAAALLTREASKLTFGQDIEITSSHNLESLLRSPPDKWLTNARITQYQVLLLDPPRVRFKQTAALNPATLLPETDDTLPIHHCLDTLDSLTSTRPDLTDQPLAQAEATLFTDGSSYIRDGKRYAGAAVVTLDSVIWAEPLPIGTSAQKAELIALTKALEWSKDKSVNIYTDSRYAFATLHVHGMIYRERGWLTAGGKAIKNAPEILALLTAVWLPKRVAVMHCKGHQKDDAPTSTGNRRADEVAREVAIRPLSTQATISAGKRTADGSEFEKRTADGSEFESPKKKAKVE

SEQ ID NO: 7463 - protein, 2102 aa, synthetic construct
MPAAKRVKLDGGDKKYSIGLDIGTNSVGWAVITDEYKVPSKKFKVLGNTDRHSIKKNLIGALLFDSGETAEATRLKRTARRRYTRRKNRICYLQEIFSNEMAKVDDSFFHRLEESFLVEEDKKHERHPIFGNIVDEVAYHEKYPTIYHLRKKLVDSTDKADLRLIYLALAHMIKFRGHFLIEGDLNPDNSDVDKLFIQLVQTYNQLFEENPINASGVDAKAILSARLSKSRRLENLIAQLPGEKKNGLFGNLIALSLGLTPNFKSNFDLAEDAKLQLSKDTYDDDLDNLLAQIGDQYADLFLAAKNLSDAILLSDILRVNTEITKAPLSASMIKRYDEHHQDLTLLKALVRQQLPEKYKEIFFDQSKNGYAGYIDGGASQEEFYKFIKPILEKMDGTEELLVKLNREDLLRKQRTFDNGSIPHQIHLGELHAILRRQEDFYPFLKDNREKIEKILTFRIPYYVGPLARGNSRFAWMTRKSEETITPWNFEEVVDKGASAQSFIERMTNFDKNLPNEKVLPKHSLLYEYFTVYNELTKVKYVTEGMRKPAFLSGEQKKAIVDLLFKTNRKVTVKQLKEDYFKKIECFDSVEISGVEDRFNASLGTYHDLLKIIKDKDFLDNEENEDILEDIVLTLTLFEDREMIEERLKTYAHLFDDKVMKQLKRRRYTGWGRLSRKLINGIRDKQSGKTILDFLKSDGFANRNFMQLIHDDSLTFKEDIQKAQVSGQGDSLHEHIANLAGSPAIKKGILQTVKVVDELVKVMGRHKPENIVIEMARENQTTQKGQKNSRERMKRIEEGIKELGSQILKEHPVENTQLQNEKLYLYYLQNGRDMYVDQELDINRLSDYDVDHIVPQSFLKDDSIDNKVLTRSDKARGKSDNVPSEEVVKKMKNYWRQLLNAKLITQRKFDNLTKAERGGLSELDKAGFIKRQLVETRQITKHVAQILDSRMNTKYDENDKLIREVKVITLKSKLVSDFRKDFQFYKVREINNYHHAHDAYLNAVVGTALIKKYPKLESEFVYGDYKVYDVRKMIAKSEQEIGKATAKYFFYSNIMNFFKTEITLANGEIRKRPLIETNGETGEIVWDKGRDFATVRKVLSMPQVNIVKKTEVQTGGFSKESILPKRNSDKLIARKKDWDPKKYGGFDSPTVAYSVLVVAKVEKGKSKKLKSVKELLGITIMERSSFEKNPIDFLEAKGYKEVKKDLIIKLPKYSLFELENGRKRMLASAGELQKGNELALPSKYVNFLYLASHYEKLKGSPEDNEQKQLFVEQHKHYLDEIIEQISEFSKRVILADANLDKVLSAYNKHRDKPIREQAENIIHLFTLTNLGAPAAFKYFDTTIDRKRYTSTKEVLDATLIHQSITGLYETRIDLSQLGGDGGGGGPAPEAAAKGGTVSLQDEHRLFDIPVTTSLPDVWLQDFPQAWAETGGLGRAKCQAPIIIDLKPTAVPVSIKQYPMSLEAHMGIRQHIIKFLELGVLRPCRSPWNTPLLPVKKPGTQDYRPVQDLREINKRTVDIHPTVPNPYNLLSTLKPDYSWYTVLDLKDAFFCLPLAPQSQELFAFEWKDPERGISGQLTWTRLPQGFKNSPTLFNEALHRDLTDFRTQHPEVTLLQYVDDLLLAAPTKKACTQGTRHLLQELGEKGYRASAKKAQICQTKVTYLGYILSEGKRWLTPGRIETVARIPPPRNPREVREFLGTAGFCRLWIPGFAELAAPLYALTKPSTPFTWQTEHQLAFEALKKALLSAPALGLPDTSKPFTLFLDERQGIAKGVLTQKLGPWKRPVAYLSKKLDPVAAGWPPCLRIMAATAMLVKDSAKLTLGQPLTVITPHTLEAIVRQPPDRWITNARLTHYQALLLDTDRVQFGPPVTLNPATLLPVPENQPSPHDCRQVLAETHGTREDLKDQELPDADHTWYTDGSSYLDSGTRRAGAAVVDGHNTIWAQSLPPGTSAQKAELIALTKALELSKGKKANIYTDSRYAFATAHTHGSIYERRGWLTSEGKEIKNKAEIIALLKALFLPQEVAIIHCPGHQKGQDPVAVGNRQADRVARQAAMAEVLTLATEPDNTSHITAGKRTADGSEFEKRTADGSEFESPKKKAKVE

SEQ ID NO: 7464 - protein, 2173 aa, synthetic construct
MPAAKRVKLDGGDKKYSIGLDIGTNSVGWAVITDEYKVPSKKFKVLGNTDRHSIKKNLIGALLFDSGETAEATRLKRTARRRYTRRKNRICYLQEIFSNEMAKVDDSFFHRLEESFLVEEDKKHERHPIFGNIVDEVAYHEKYPTIYHLRKKLVDSTDKADLRLIYLALAHMIKFRGHFLIEGDLNPDNSDVDKLFIQLVQTYNQLFEENPINASGVDAKAILSARLSKSRRLENLIAQLPGEKKNGLFGNLIALSLGLTPNFKSNFDLAEDAKLQLSKDTYDDDLDNLLAQIGDQYADLFLAAKNLSDAILLSDILRVNTEITKAPLSASMIKRYDEHHQDLTLLKALVRQQLPEKYKEIFFDQSKNGYAGYIDGGASQEEFYKFIKPILEKMDGTEELLVKLNREDLLRKQRTFDNGSIPHQIHLGELHAILRRQEDFYPFLKDNREKIEKILTFRIPYYVGPLARGNSRFAWMTRKSEETITPWNFEEVVDKGASAQSFIERMTNFDKNLPNEKVLPKHSLLYEYFTVYNELTKVKYVTEGMRKPAFLSGEQKKAIVDLLFKTNRKVTVKQLKEDYFKKIECFDSVEISGVEDRFNASLGTYHDLLKIIKDKDFLDNEENEDILEDIVLTLTLFEDREMIEERLKTYAHLFDDKVMKQLKRRRYTGWGRLSRKLINGIRDKQSGKTILDFLKSDGFANRNFMQLIHDDSLTFKEDIQKAQVSGQGDSLHEHIANLAGSPAIKKGILQTVKVVDELVKVMGRHKPENIVIEMARENQTTQKGQKNSRERMKRIEEGIKELGSQILKEHPVENTQLQNEKLYLYYLQNGRDMYVDQELDINRLSDYDVDHIVPQSFLKDDSIDNKVLTRSDKARGKSDNVPSEEVVKKMKNYWRQLLNAKLITQRKFDNLTKAERGGLSELDKAGFIKRQLVETRQITKHVAQILDSRMNTKYDENDKLIREVKVITLKSKLVSDFRKDFQFYKVREINNYHHAHDAYLNAVVGTALIKKYPKLESEFVYGDYKVYDVRKMIAKSEQEIGKATAKYFFYSNIMNFFKTEITLANGEIRKRPLIETNGETGEIVWDKGRDFATVRKVLSMPQVNIVKKTEVQTGGFSKESILPKRNSDKLIARKKDWDPKKYGGFDSPTVAYSVLVVAKVEKGKSKKLKSVKELLGITIMERSSFEKNPIDFLEAKGYKEVKKDLIIKLPKYSLFELENGRKRMLASAGELQKGNELALPSKYVNFLYLASHYEKLKGSPEDNEQKQLFVEQHKHYLDEIIEQISEFSKRVILADANLDKVLSAYNKHRDKPIREQAENIIHLFTLTNLGAPAAFKYFDTTIDRKRYTSTKEVLDATLIHQSITGLYETRIDLSQLGGDGGGGGPAPEAAAKGGMDLLKPLTVERKGVKIKGYWNSQADITCVPKDLLQGEEPVRQQNVTTIHGTQEGDVYYVNLKIDGRRINTEVIGTTLDYAIITPGDVPWILKKPLELTIKLDLEEQQGTLLNNSILSKKGKEELKQLFEKYSALWQSWENQVGHRRIRPHKIATGTVKPTPQKQYHINPKAKPDIQIVINDLLKQGVLIQKESTMNTPVYPVPKPNGRWRMVLDYRAVNKVTPLIAVQNQHSYGILGSLFKGRYKTTIDLSNGFWAHPIVPEDYWITAFTWQGKQYCWTVLPQGFLNSPGLFTGDVVDLLQGIPNVEVYVDDVYISHDSEKEHLEYLDILFNRLKEAGYIISLKKSNIANSIVDFLGFQITNEGRGLTDTFKEKLENITAPTTLKQLQSILGLLNFARNFIPDFTELIAPLYALIPKSTKNYVPWQIEHSTTLETLITKLNGAEYLQGRKGDKTLIMKVNASYTTGYIRYYNEGEKKPISYVSIVFSKTELKFTELEKLLTTVHKGLLKALDLSMGQNIHVYSPIVSMQNIQKTPQTAKKALASRWLSWLSYLEDPRIRFFYDPQMPALKDLPAVDTGKDNKKHPSNFQHIFYTDGSAITSPTKEGHLNAGMGIVYFINKDGNLQKQQEWSISLGNHTAQFAEIAAFEFALKKCLPLGGNILVVTDSNYVAKAYNEELDVWASNGFVNNRKKPLKHISKWKSVADLKRLRPDVVVTHEPGHQKLDSSPHAYGNNLADQLATQASFKVHAGKRTADGSEFEKRTADGSEFESPKKKAKVE

SEQ ID NO: 7465 - protein, 2087 aa, synthetic construct
MPAAKRVKLDGGDKKYSIGLDIGTNSVGWAVITDEYKVPSKKFKVLGNTDRHSIKKNLIGALLFDSGETAEATRLKRTARRRYTRRKNRICYLQEIFSNEMAKVDDSFFHRLEESFLVEEDKKHERHPIFGNIVDEVAYHEKYPTIYHLRKKLVDSTDKADLRLIYLALAHMIKFRGHFLIEGDLNPDNSDVDKLFIQLVQTYNQLFEENPINASGVDAKAILSARLSKSRRLENLIAQLPGEKKNGLFGNLIALSLGLTPNFKSNFDLAEDAKLQLSKDTYDDDLDNLLAQIGDQYADLFLAAKNLSDAILLSDILRVNTEITKAPLSASMIKRYDEHHQDLTLLKALVRQQLPEKYKEIFFDQSKNGYAGYIDGGASQEEFYKFIKPILEKMDGTEELLVKLNREDLLRKQRTFDNGSIPHQIHLGELHAILRRQEDFYPFLKDNREKIEKILTFRIPYYVGPLARGNSRFAWMTRKSEETITPWNFEEVVDKGASAQSFIERMTNFDKNLPNEKVLPKHSLLYEYFTVYNELTKVKYVTEGMRKPAFLSGEQKKAIVDLLFKTNRKVTVKQLKEDYFKKIECFDSVEISGVEDRFNASLGTYHDLLKIIKDKDFLDNEENEDILEDIVLTLTLFEDREMIEERLKTYAHLFDDKVMKQLKRRRYTGWGRLSRKLINGIRDKQSGKTILDFLKSDGFANRNFMQLIHDDSLTFKEDIQKAQVSGQGDSLHEHIANLAGSPAIKKGILQTVKVVDELVKVMGRHKPENIVIEMARENQTTQKGQKNSRERMKRIEEGIKELGSQILKEHPVENTQLQNEKLYLYYLQNGRDMYVDQELDINRLSDYDVDHIVPQSFLKDDSIDNKVLTRSDKARGKSDNVPSEEVVKKMKNYWRQLLNAKLITQRKFDNLTKAERGGLSELDKAGFIKRQLVETRQITKHVAQILDSRMNTKYDENDKLIREVKVITLKSKLVSDFRKDFQFYKVREINNYHHAHDAYLNAVVGTALIKKYPKLESEFVYGDYKVYDVRKMIAKSEQEIGKATAKYFFYSNIMNFFKTEITLANGEIRKRPLIETNGETGEIVWDKGRDFATVRKVLSMPQVNIVKKTEVQTGGFSKESILPKRNSDKLIARKKDWDPKKYGGFDSPTVAYSVLVVAKVEKGKSKKLKSVKELLGITIMERSSFEKNPIDFLEAKGYKEVKKDLIIKLPKYSLFELENGRKRMLASAGELQKGNELALPSKYVNFLYLASHYEKLKGSPEDNEQKQLFVEQHKHYLDEIIEQISEFSKRVILADANLDKVLSAYNKHRDKPIREQAENIIHLFTLTNLGAPAAFKYFDTTIDRKRYTSTKEVLDATLIHQSITGLYETRIDLSQLGGDGGGGGPAPEAAAKGGVPWILKKPLELTIKLDLEEQQGTLLNNSILSKKGKEELKQLFEKYSALWQSWENQVGHRRIRPHKIATGTVKPTPQKQYHINPKAKPDIQIVINDLLKQGVLIQKESTMNTPVYPVPKPNGRWRMVLDYRAVNKVTPLIAVQNQHSYGILGSLFKGRYKTTIDLSNGFWAHPIVPEDYWITAFTWQGKQYCWTVLPQGFLNSPGLFNGDVVDLLQGIPNVEVYVDDVYISHDSEKEHLEYLDILFNRLKEAGYIISLKKSNIANSIVDFLGFQITNEGRGLTDTFKEKLENITAPTTLKQLQSILGLLNFARNFIPDFTELIAPLYALIPKSPKNYVPWQIEHSTTLETLITKLNGAEYLQGRKGDKTLIMKVNASYTTGYIRYYNEGEKKPISYVSIVFSKTELKFTELEKLLTTVHKGLLKALDLSMGQNIHVYSPIVSMQNIQKTPQTAKKALASRWLSWLSYLEDPRIRFFYDPQMPALKDLPAVDTGKDNKKHPSNFQHIFYTDGSAITSPTKEGHLNAGMGIVYFINKDGNLQKQQEWSISLGNHTAQFAEIAAFEFALKKCLPLGGNILVVTDSNYVAKAYNEELDVWASNGFVNNRKKPLKHISKWKSVADLKRLRPDVVVTHEPGHQKLDSSPHAYGNNLADQLATQASFKVHAGKRTADGSEFEKRTADGSEFESPKKKAKVE

SEQ ID NO: 7466 - protein, 2173 aa, synthetic construct
MPAAKRVKLDGGDKKYSIGLDIGTNSVGWAVITDEYKVPSKKFKVLGNTDRHSIKKNLIGALLFDSGETAEATRLKRTARRRYTRRKNRICYLQEIFSNEMAKVDDSFFHRLEESFLVEEDKKHERHPIFGNIVDEVAYHEKYPTIYHLRKKLVDSTDKADLRLIYLALAHMIKFRGHFLIEGDLNPDNSDVDKLFIQLVQTYNQLFEENPINASGVDAKAILSARLSKSRRLENLIAQLPGEKKNGLFGNLIALSLGLTPNFKSNFDLAEDAKLQLSKDTYDDDLDNLLAQIGDQYADLFLAAKNLSDAILLSDILRVNTEITKAPLSASMIKRYDEHHQDLTLLKALVRQQLPEKYKEIFFDQSKNGYAGYIDGGASQEEFYKFIKPILEKMDGTEELLVKLNREDLLRKQRTFDNGSIPHQIHLGELHAILRRQEDFYPFLKDNREKIEKILTFRIPYYVGPLARGNSRFAWMTRKSEETITPWNFEEVVDKGASAQSFIERMTNFDKNLPNEKVLPKHSLLYEYFTVYNELTKVKYVTEGMRKPAFLSGEQKKAIVDLLFKTNRKVTVKQLKEDYFKKIECFDSVEISGVEDRFNASLGTYHDLLKIIKDKDFLDNEENEDILEDIVLTLTLFEDREMIEERLKTYAHLFDDKVMKQLKRRRYTGWGRLSRKLINGIRDKQSGKTILDFLKSDGFANRNFMQLIHDDSLTFKEDIQKAQVSGQGDSLHEHIANLAGSPAIKKGILQTVKVVDELVKVMGRHKPENIVIEMARENQTTQKGQKNSRERMKRIEEGIKELGSQILKEHPVENTQLQNEKLYLYYLQNGRDMYVDQELDINRLSDYDVDHIVPQSFLKDDSIDNKVLTRSDKARGKSDNVPSEEVVKKMKNYWRQLLNAKLITQRKFDNLTKAERGGLSELDKAGFIKRQLVETRQITKHVAQILDSRMNTKYDENDKLIREVKVITLKSKLVSDFRKDFQFYKVREINNYHHAHDAYLNAVVGTALIKKYPKLESEFVYGDYKVYDVRKMIAKSEQEIGKATAKYFFYSNIMNFFKTEITLANGEIRKRPLIETNGETGEIVWDKGRDFATVRKVLSMPQVNIVKKTEVQTGGFSKESILPKRNSDKLIARKKDWDPKKYGGFDSPTVAYSVLVVAKVEKGKSKKLKSVKELLGITIMERSSFEKNPIDFLEAKGYKEVKKDLIIKLPKYSLFELENGRKRMLASAGELQKGNELALPSKYVNFLYLASHYEKLKGSPEDNEQKQLFVEQHKHYLDEIIEQISEFSKRVILADANLDKVLSAYNKHRDKPIREQAENIIHLFTLTNLGAPAAFKYFDTTIDRKRYTSTKEVLDATLIHQSITGLYETRIDLSQLGGDGGGGGPAPEAAAKGGMDLLKPLTVERKGVKIKGYWNSQADITCVPKDLLQGEEPVRQQNVTTIHGTQEGDVYYVNLKIDGRRINTEVIGTTLDYAIITPGDVPWILKKPLELTIKLDLEEQQGTLLNNSILSKKGKEELKQLFEKYSALWQSWENQVGHRRIRPHKIATGTVKPTPQKQYHINPKAKPDIQIVINDLLKQGVLIQKESTMNTPVYPVPKPNGRWRMVLDYRAVNKVTPLIAVQNQHSYGILGSLFKGRYKTTIDLSNGFWAHPIVPEDYWITAFTWQGKQYCWTVLPQGFLNSPGLFNGDVVDLLQGIPNVEVYVDDVYISHDSEKEHLEYLDILFNRLKEAGYIISLKKSNIANSIVDFLGFQITNEGRGLTDTFKEKLENITAPTTLKQLQSILGLLNFARNFIPDFTELIAPLYALIPKSPKNYVPWQIEHSTTLETLITKLNGAEYLQGRKGDKTLIMKVNASYTTGYIRYYNEGEKKPISYVSIVFSKTELKFTELEKLLTTVHKGLLKALDLSMGQNIHVYSPIVSMQNIQKTPQTAKKALASRWLSWLSYLEDPRIRFFYDPQMPALKDLPAVDTGKDNKKHPSNFQHIFYTDGSAITSPTKEGHLNAGMGIVYFINKDGNLQKQQEWSISLGNHTAQFAEIAAFEFALKKCLPLGGNILVVTDSNYVAKAYNEELDVWASNGFVNNRKKPLKHISKWKSVADLKRLRPDVVVTHEPGHQKLDSSPHAYGNNLADQLATQASFKVHAGKRTADGSEFEKRTADGSEFESPKKKAKVE

SEQ ID NO: 7467 - protein, 2094 aa, synthetic construct
MPAAKRVKLDGGDKKYSIGLDIGTNSVGWAVITDEYKVPSKKFKVLGNTDRHSIKKNLIGALLFDSGETAEATRLKRTARRRYTRRKNRICYLQEIFSNEMAKVDDSFFHRLEESFLVEEDKKHERHPIFGNIVDEVAYHEKYPTIYHLRKKLVDSTDKADLRLIYLALAHMIKFRGHFLIEGDLNPDNSDVDKLFIQLVQTYNQLFEENPINASGVDAKAILSARLSKSRRLENLIAQLPGEKKNGLFGNLIALSLGLTPNFKSNFDLAEDAKLQLSKDTYDDDLDNLLAQIGDQYADLFLAAKNLSDAILLSDILRVNTEITKAPLSASMIKRYDEHHQDLTLLKALVRQQLPEKYKEIFFDQSKNGYAGYIDGGASQEEFYKFIKPILEKMDGTEELLVKLNREDLLRKQRTFDNGSIPHQIHLGELHAILRRQEDFYPFLKDNREKIEKILTFRIPYYVGPLARGNSRFAWMTRKSEETITPWNFEEVVDKGASAQSFIERMTNFDKNLPNEKVLPKHSLLYEYFTVYNELTKVKYVTEGMRKPAFLSGEQKKAIVDLLFKTNRKVTVKQLKEDYFKKIECFDSVEISGVEDRFNASLGTYHDLLKIIKDKDFLDNEENEDILEDIVLTLTLFEDREMIEERLKTYAHLFDDKVMKQLKRRRYTGWGRLSRKLINGIRDKQSGKTILDFLKSDGFANRNFMQLIHDDSLTFKEDIQKAQVSGQGDSLHEHIANLAGSPAIKKGILQTVKVVDELVKVMGRHKPENIVIEMARENQTTQKGQKNSRERMKRIEEGIKELGSQILKEHPVENTQLQNEKLYLYYLQNGRDMYVDQELDINRLSDYDVDHIVPQSFLKDDSIDNKVLTRSDKARGKSDNVPSEEVVKKMKNYWRQLLNAKLITQRKFDNLTKAERGGLSELDKAGFIKRQLVETRQITKHVAQILDSRMNTKYDENDKLIREVKVITLKSKLVSDFRKDFQFYKVREINNYHHAHDAYLNAVVGTALIKKYPKLESEFVYGDYKVYDVRKMIAKSEQEIGKATAKYFFYSNIMNFFKTEITLANGEIRKRPLIETNGETGEIVWDKGRDFATVRKVLSMPQVNIVKKTEVQTGGFSKESILPKRNSDKLIARKKDWDPKKYGGFDSPTVAYSVLVVAKVEKGKSKKLKSVKELLGITIMERSSFEKNPIDFLEAKGYKEVKKDLIIKLPKYSLFELENGRKRMLASAGELQKGNELALPSKYVNFLYLASHYEKLKGSPEDNEQKQLFVEQHKHYLDEIIEQISEFSKRVILADANLDKVLSAYNKHRDKPIREQAENIIHLFTLTNLGAPAAFKYFDTTIDRKRYTSTKEVLDATLIHQSITGLYETRIDLSQLGGDGGGGGPAPEAAAKGGVLNLEEEYRLHEKPVPSSIDPSWLQLFPTVWAERAGMGLANQVPPVVVELRSGASPVAVRQYPMSKEAREGIRPHIQKFLDLGVLVPCRSPWNTPLLPVKKPGTNDYRPVQDLREINKRVQDIHPTVPNPYNLLSSLPPSYTWYSVLDLKDAFFCLRLHPNSQPLFAFEWKDPEKGNTGQLTWTRLPQGFKNSPTLFNEALHRDLAPFRALNPQVVLLQYVDDLLVAAPTYEDCKKGTQKLLQELSKLGYRVSAKKAQLCQREVTYLGYLLKEGKRWLTPARKATVMKIPVPTTPRQVREFLGKAGFCRLFIPGFASLAAPLYPLTKPSIPFIWTEEHQQAFDHIKKALLSAPALALPDLTKPFTLYIDERAGVARGVLTQTLGPWRRPVAYLSKKLDPVASGWPTCLKAVAAVALLLKDADKLTLGQNVTVIASHSLESIVRQPPDRWMTNARMTHYQSLLLNERVSFAPPAVLNPATLLPVESEATPVHRCSEILAEETGTRRDLEDQPLPGVPTWYTDGSSFITEGKRRAGAPIVDGKRTVWASSLPEGTSAQKAELVALTQALRLAEGKNINIYTDSRYAFATAHIHGAIYKQRGWLTSAGKDIKNKEEILALLEAIHLPRRVAIIHCPGHQRGSNPVATGNRRADEAAKQAALSTRVLAGTTKPAGKRTADGSEFEKRTADGSEFESPKKKAKVE

SEQ ID NO: 7468 - protein, 2009 aa, synthetic construct
MPAAKRVKLDGGDKKYSIGLDIGTNSVGWAVITDEYKVPSKKFKVLGNTDRHSIKKNLIGALLFDSGETAEATRLKRTARRRYTRRKNRICYLQEIFSNEMAKVDDSFFHRLEESFLVEEDKKHERHPIFGNIVDEVAYHEKYPTIYHLRKKLVDSTDKADLRLIYLALAHMIKFRGHFLIEGDLNPDNSDVDKLFIQLVQTYNQLFEENPINASGVDAKAILSARLSKSRRLENLIAQLPGEKKNGLFGNLIALSLGLTPNFKSNFDLAEDAKLQLSKDTYDDDLDNLLAQIGDQYADLFLAAKNLSDAILLSDILRVNTEITKAPLSASMIKRYDEHHQDLTLLKALVRQQLPEKYKEIFFDQSKNGYAGYIDGGASQEEFYKFIKPILEKMDGTEELLVKLNREDLLRKQRTFDNGSIPHQIHLGELHAILRRQEDFYPFLKDNREKIEKILTFRIPYYVGPLARGNSRFAWMTRKSEETITPWNFEEVVDKGASAQSFIERMTNFDKNLPNEKVLPKHSLLYEYFTVYNELTKVKYVTEGMRKPAFLSGEQKKAIVDLLFKTNRKVTVKQLKEDYFKKIECFDSVEISGVEDRFNASLGTYHDLLKIIKDKDFLDNEENEDILEDIVLTLTLFEDREMIEERLKTYAHLFDDKVMKQLKRRRYTGWGRLSRKLINGIRDKQSGKTILDFLKSDGFANRNFMQLIHDDSLTFKEDIQKAQVSGQGDSLHEHIANLAGSPAIKKGILQTVKVVDELVKVMGRHKPENIVIEMARENQTTQKGQKNSRERMKRIEEGIKELGSQILKEHPVENTQLQNEKLYLYYLQNGRDMYVDQELDINRLSDYDVDHIVPQSFLKDDSIDNKVLTRSDKARGKSDNVPSEEVVKKMKNYWRQLLNAKLITQRKFDNLTKAERGGLSELDKAGFIKRQLVETRQITKHVAQILDSRMNTKYDENDKLIREVKVITLKSKLVSDFRKDFQFYKVREINNYHHAHDAYLNAVVGTALIKKYPKLESEFVYGDYKVYDVRKMIAKSEQEIGKATAKYFFYSNIMNFFKTEITLANGEIRKRPLIETNGETGEIVWDKGRDFATVRKVLSMPQVNIVKKTEVQTGGFSKESILPKRNSDKLIARKKDWDPKKYGGFDSPTVAYSVLVVAKVEKGKSKKLKSVKELLGITIMERSSFEKNPIDFLEAKGYKEVKKDLIIKLPKYSLFELENGRKRMLASAGELQKGNELALPSKYVNFLYLASHYEKLKGSPEDNEQKQLFVEQHKHYLDEIIEQISEFSKRVILADANLDKVLSAYNKHRDKPIREQAENIIHLFTLTNLGAPAAFKYFDTTIDRKRYTSTKEVLDATLIHQSITGLYETRIDLSQLGGDGGGGGPAPEAAAKGGHLPPPPQVDQFPLNLPERLQALNDLVSKALEAGHIEPYSGPGNNPVFPVKKPNGKWRFIHDLRATNAITTTLTSPSPGPPDLTSLPTALPHLQTIDLTDAFFQIPLPKQYQPYFAFTIPQPCNYGPGTRYAWTVLPQGFKNSPTLFQQQLAAVLNPMRKMFPTSTIVQYMDDILLASPTNEELQQLSQLTLQALTTHGLPISQEKTQQTPGQIRFLGQVISPNHITYESTPTIPIKSQWTLTELQVILGEIQWVSKGTPILRKHLQSLYSALHPYRDPRACITLTPQQLHALHAIQQALQHNCRGRLNPALPLLGLISLSTSGTTSVIFQPKQNWPLAWLHTPHPPTSLCPWGHLLACTILTLDKYTLQHYGQLCQSFHHNMSKQALCDFLRNSPHPSVGILIHHMGRFHNLGSQPSGPWKTLLHLPTLLQEPRLLRPIFTLSPVVLDTAPCLFSDGSPQKAAYVLWDQTILQQDITPLPSHETHSAQKGELLALICGLRAAKPWPSLNIFLDSKYLIKYLHSLAIGAFLGTSAHQTLQAALPPLLQGKTIYLHHVRSHTNLPDPISTFNEYTDSLILAPLVPLAGKRTADGSEFEKRTADGSEFESPKKKAKVE

SEQ ID NO: 7469 - protein, 2127 aa, synthetic construct
MPAAKRVKLDGGDKKYSIGLDIGTNSVGWAVITDEYKVPSKKFKVLGNTDRHSIKKNLIGALLFDSGETAEATRLKRTARRRYTRRKNRICYLQEIFSNEMAKVDDSFFHRLEESFLVEEDKKHERHPIFGNIVDEVAYHEKYPTIYHLRKKLVDSTDKADLRLIYLALAHMIKFRGHFLIEGDLNPDNSDVDKLFIQLVQTYNQLFEENPINASGVDAKAILSARLSKSRRLENLIAQLPGEKKNGLFGNLIALSLGLTPNFKSNFDLAEDAKLQLSKDTYDDDLDNLLAQIGDQYADLFLAAKNLSDAILLSDILRVNTEITKAPLSASMIKRYDEHHQDLTLLKALVRQQLPEKYKEIFFDQSKNGYAGYIDGGASQEEFYKFIKPILEKMDGTEELLVKLNREDLLRKQRTFDNGSIPHQIHLGELHAILRRQEDFYPFLKDNREKIEKILTFRIPYYVGPLARGNSRFAWMTRKSEETITPWNFEEVVDKGASAQSFIERMTNFDKNLPNEKVLPKHSLLYEYFTVYNELTKVKYVTEGMRKPAFLSGEQKKAIVDLLFKTNRKVTVKQLKEDYFKKIECFDSVEISGVEDRFNASLGTYHDLLKIIKDKDFLDNEENEDILEDIVLTLTLFEDREMIEERLKTYAHLFDDKVMKQLKRRRYTGWGRLSRKLINGIRDKQSGKTILDFLKSDGFANRNFMQLIHDDSLTFKEDIQKAQVSGQGDSLHEHIANLAGSPAIKKGILQTVKVVDELVKVMGRHKPENIVIEMARENQTTQKGQKNSRERMKRIEEGIKELGSQILKEHPVENTQLQNEKLYLYYLQNGRDMYVDQELDINRLSDYDVDHIVPQSFLKDDSIDNKVLTRSDKARGKSDNVPSEEVVKKMKNYWRQLLNAKLITQRKFDNLTKAERGGLSELDKAGFIKRQLVETRQITKHVAQILDSRMNTKYDENDKLIREVKVITLKSKLVSDFRKDFQFYKVREINNYHHAHDAYLNAVVGTALIKKYPKLESEFVYGDYKVYDVRKMIAKSEQEIGKATAKYFFYSNIMNFFKTEITLANGEIRKRPLIETNGETGEIVWDKGRDFATVRKVLSMPQVNIVKKTEVQTGGFSKESILPKRNSDKLIARKKDWDPKKYGGFDSPTVAYSVLVVAKVEKGKSKKLKSVKELLGITIMERSSFEKNPIDFLEAKGYKEVKKDLIIKLPKYSLFELENGRKRMLASAGELQKGNELALPSKYVNFLYLASHYEKLKGSPEDNEQKQLFVEQHKHYLDEIIEQISEFSKRVILADANLDKVLSAYNKHRDKPIREQAENIIHLFTLTNLGAPAAFKYFDTTIDRKRYTSTKEVLDATLIHQSITGLYETRIDLSQLGGDGGGGGPAPEAAAKGGLLGRDLLTKLKAQIQFSTEGPQVTWEDRPAMCLVLNLEEEYRLHEKPVPPSIDPSWLQLFPMVWAEKAGMGLANQVPPVVVELKSDASPVAVRQYPMSKEAREGIRPHIQRFLDLGILVPCQSPWNTPLLPVKKPGTNDYRPVQDLREVNKRVQDIHPTVPNPYNLLSSLPPSHTWYSVLDLKDAFFCLKLHPNSQPLFAFEWRDPEKGNTGQLTWTRLPQGFKNSPTLFNEALHRDLASFRALNPQVVMLQYVDDLLVAAPTYRDCKEGTRRLLQELSKLGYRVSAKKAQLCREEVTYLGYLLKGGKRWLTPARKATVMKIPTPTTPRQVREFLGTAGFCRLWIPGFASLAAPLYPLTRPKVPFTWTEAHQEAFGRIKEALLSAPALALPDLTKPFALYVDEKEGVARGVLTQTLGPWRRPVAYLSKKLDPVASGWPTCLKAIAAVALLLKDADKLTLGQNVLVIAPHNLESIVRQPPDRWMTNARMTHYQSLLLNERVSFAPPAILNPATLLPVESDDTPIHICSEILAEETGTRPDLRDQPLPGVPAWYTDGSSFIMDGRRQAGAAIVDNKRTVWASNLPEGTSAQKAELIALTQALRLAEGKSINIYTDSRYAFATAHVHGAIYKQRGWLTSAGKDIKNKEEILALLEAIHLPKRVAIIHCPGHQRGTDPVATGNRKADEAAKQAAQSTRILTETTKNAGKRTADGSEFEKRTADGSEFESPKKKAKVE

SEQ ID NO: 7470 - protein, 2127 aa, synthetic construct
MPAAKRVKLDGGDKKYSIGLDIGTNSVGWAVITDEYKVPSKKFKVLGNTDRHSIKKNLIGALLFDSGETAEATRLKRTARRRYTRRKNRICYLQEIFSNEMAKVDDSFFHRLEESFLVEEDKKHERHPIFGNIVDEVAYHEKYPTIYHLRKKLVDSTDKADLRLIYLALAHMIKFRGHFLIEGDLNPDNSDVDKLFIQLVQTYNQLFEENPINASGVDAKAILSARLSKSRRLENLIAQLPGEKKNGLFGNLIALSLGLTPNFKSNFDLAEDAKLQLSKDTYDDDLDNLLAQIGDQYADLFLAAKNLSDAILLSDILRVNTEITKAPLSASMIKRYDEHHQDLTLLKALVRQQLPEKYKEIFFDQSKNGYAGYIDGGASQEEFYKFIKPILEKMDGTEELLVKLNREDLLRKQRTFDNGSIPHQIHLGELHAILRRQEDFYPFLKDNREKIEKILTFRIPYYVGPLARGNSRFAWMTRKSEETITPWNFEEVVDKGASAQSFIERMTNFDKNLPNEKVLPKHSLLYEYFTVYNELTKVKYVTEGMRKPAFLSGEQKKAIVDLLFKTNRKVTVKQLKEDYFKKIECFDSVEISGVEDRFNASLGTYHDLLKIIKDKDFLDNEENEDILEDIVLTLTLFEDREMIEERLKTYAHLFDDKVMKQLKRRRYTGWGRLSRKLINGIRDKQSGKTILDFLKSDGFANRNFMQLIHDDSLTFKEDIQKAQVSGQGDSLHEHIANLAGSPAIKKGILQTVKVVDELVKVMGRHKPENIVIEMARENQTTQKGQKNSRERMKRIEEGIKELGSQILKEHPVENTQLQNEKLYLYYLQNGRDMYVDQELDINRLSDYDVDHIVPQSFLKDDSIDNKVLTRSDKARGKSDNVPSEEVVKKMKNYWRQLLNAKLITQRKFDNLTKAERGGLSELDKAGFIKRQLVETRQITKHVAQILDSRMNTKYDENDKLIREVKVITLKSKLVSDFRKDFQFYKVREINNYHHAHDAYLNAVVGTALIKKYPKLESEFVYGDYKVYDVRKMIAKSEQEIGKATAKYFFYSNIMNFFKTEITLANGEIRKRPLIETNGETGEIVWDKGRDFATVRKVLSMPQVNIVKKTEVQTGGFSKESILPKRNSDKLIARKKDWDPKKYGGFDSPTVAYSVLVVAKVEKGKSKKLKSVKELLGITIMERSSFEKNPIDFLEAKGYKEVKKDLIIKLPKYSLFELENGRKRMLASAGELQKGNELALPSKYVNFLYLASHYEKLKGSPEDNEQKQLFVEQHKHYLDEIIEQISEFSKRVILADANLDKVLSAYNKHRDKPIREQAENIIHLFTLTNLGAPAAFKYFDTTIDRKRYTSTKEVLDATLIHQSITGLYETRIDLSQLGGDGGGGGPAPEAAAKGGLLGRDLLTKLKAQIQFSTEGPQVTWEDRPAMCLVLNLEEEYRLHEKPVPPSIDPSWLQLFPMVWAEKAGMGLANQVPPVVVELKSDASPVAVRQYPMSKEAREGIRPHIQRFLDLGILVPCQSPWNTPLLPVKKPGTNDYRPVQDLREVNKRVQDIHPTVPNPYNLLSSLPPSHTWYSVLDLKDAFFCLKLHPNSQPLFAFEWRDPEKGNTGQLTWTRLPQGFKNSPTLFNEALHRDLASFRALNPQVVMLQYVDDLLVAAPTYRDCKEGTRRLLQELSKLGYRVSAKKAQLCREEVTYLGYLLKGGKRWLTPARKATVMKIPTPTTPRQVREFLGKAGFCRLFIPGFASLAAPLYPLTRPKVPFTWTEAHQEAFGRIKEALLSAPALALPDLTKPFALYVDEKEGVARGVLTQTLGPWRRPVAYLSKKLDPVASGWPTCLKAIAAVALLLKDADKLTLGQNVLVIAPHNLESIVRQPPDRWMTNARMTHYQSLLLNERVSFAPPAILNPATLLPVESDDTPIHICSEILAEETGTRPDLRDQPLPGVPAWYTDGSSFIMDGRRQAGAAIVDNKRTVWASNLPEGTSAQKAELIALTQALRLAEGKSINIYTDSRYAFATAHVHGAIYKQRGWLTSAGKDIKNKEEILALLEAIHLPKRVAIIHCPGHQRGTDPVATGNRKADEAAKQAAQSTRILTETTKNAGKRTADGSEFEKRTADGSEFESPKKKAKVE

SEQ ID NO: 7471 - protein, 2096 aa, synthetic construct
MPAAKRVKLDGGDKKYSIGLDIGTNSVGWAVITDEYKVPSKKFKVLGNTDRHSIKKNLIGALLFDSGETAEATRLKRTARRRYTRRKNRICYLQEIFSNEMAKVDDSFFHRLEESFLVEEDKKHERHPIFGNIVDEVAYHEKYPTIYHLRKKLVDSTDKADLRLIYLALAHMIKFRGHFLIEGDLNPDNSDVDKLFIQLVQTYNQLFEENPINASGVDAKAILSARLSKSRRLENLIAQLPGEKKNGLFGNLIALSLGLTPNFKSNFDLAEDAKLQLSKDTYDDDLDNLLAQIGDQYADLFLAAKNLSDAILLSDILRVNTEITKAPLSASMIKRYDEHHQDLTLLKALVRQQLPEKYKEIFFDQSKNGYAGYIDGGASQEEFYKFIKPILEKMDGTEELLVKLNREDLLRKQRTFDNGSIPHQIHLGELHAILRRQEDFYPFLKDNREKIEKILTFRIPYYVGPLARGNSRFAWMTRKSEETITPWNFEEVVDKGASAQSFIERMTNFDKNLPNEKVLPKHSLLYEYFTVYNELTKVKYVTEGMRKPAFLSGEQKKAIVDLLFKTNRKVTVKQLKEDYFKKIECFDSVEISGVEDRFNASLGTYHDLLKIIKDKDFLDNEENEDILEDIVLTLTLFEDREMIEERLKTYAHLFDDKVMKQLKRRRYTGWGRLSRKLINGIRDKQSGKTILDFLKSDGFANRNFMQLIHDDSLTFKEDIQKAQVSGQGDSLHEHIANLAGSPAIKKGILQTVKVVDELVKVMGRHKPENIVIEMARENQTTQKGQKNSRERMKRIEEGIKELGSQILKEHPVENTQLQNEKLYLYYLQNGRDMYVDQELDINRLSDYDVDHIVPQSFLKDDSIDNKVLTRSDKARGKSDNVPSEEVVKKMKNYWRQLLNAKLITQRKFDNLTKAERGGLSELDKAGFIKRQLVETRQITKHVAQILDSRMNTKYDENDKLIREVKVITLKSKLVSDFRKDFQFYKVREINNYHHAHDAYLNAVVGTALIKKYPKLESEFVYGDYKVYDVRKMIAKSEQEIGKATAKYFFYSNIMNFFKTEITLANGEIRKRPLIETNGETGEIVWDKGRDFATVRKVLSMPQVNIVKKTEVQTGGFSKESILPKRNSDKLIARKKDWDPKKYGGFDSPTVAYSVLVVAKVEKGKSKKLKSVKELLGITIMERSSFEKNPIDFLEAKGYKEVKKDLIIKLPKYSLFELENGRKRMLASAGELQKGNELALPSKYVNFLYLASHYEKLKGSPEDNEQKQLFVEQHKHYLDEIIEQISEFSKRVILADANLDKVLSAYNKHRDKPIREQAENIIHLFTLTNLGAPAAFKYFDTTIDRKRYTSTKEVLDATLIHQSITGLYETRIDLSQLGGDGGGGGPAPEAAAKGGLGIEDEYRLHETSTEPDVSLGSTWLSDFPQAWAETGGMGLAVRQAPLIIPLKATSTPVSIQQYPMSHEARLGIKPHIQRLLDQGILVPCQSPWNTPLLPVKKPGTNDYRPVQDLREVNKRVEDIHPTVPNPYNLLSGLPPSHQWYTVLDLKDAFFCLRLHPTSQPLFAFEWRDPGMGISGQLTWTRLPQGFKNSPTLFNEALHRDLADFRIQHPDLILLQYVDDILLAATSELDCQQGTRALLQTLGDLGYRASAKKAQICQKQVKYLGYLLREGQRWLTEARKETVMGQPVPKTPRQLREFLGKAGFCRLFIPGFAEMAAPLYPLTKPGTLFSWGPDQQKAYQEIKQALLTAPALGLPDLTKPFELFVDEKQGYAKGVLTQKLGPWRRPVAYLSKKLDPVAAGWPPCLRMVAAIAVLTKDAGKLTMGQPLVILAPHAVEALVKQPPDRWLSNARMTHYQAMLLDTDRVQFGPVVALNPATLLPLPEEGAPHDCLEILAETHGTRPDLTDQPIPDADHTWYTDGSSFLQEGQRKAGAAVTTETEVIWAGALPAGTSAQRAELIALTQALKMAEGKRLNVYTDSRYAFATAHIHGEIYRRRGWLTSEGREIKNKSEILALLKALFLPKRLSIIHCLGHQKGDSAEARGNRLADQAAREAAIKTPPDTSTLLIAGKRTADGSEFEKRTADGSEFESPKKKAKVE

SEQ ID NO: 7472 - protein, 2096 aa, synthetic construct
MPAAKRVKLDGGDKKYSIGLDIGTNSVGWAVITDEYKVPSKKFKVLGNTDRHSIKKNLIGALLFDSGETAEATRLKRTARRRYTRRKNRICYLQEIFSNEMAKVDDSFFHRLEESFLVEEDKKHERHPIFGNIVDEVAYHEKYPTIYHLRKKLVDSTDKADLRLIYLALAHMIKFRGHFLIEGDLNPDNSDVDKLFIQLVQTYNQLFEENPINASGVDAKAILSARLSKSRRLENLIAQLPGEKKNGLFGNLIALSLGLTPNFKSNFDLAEDAKLQLSKDTYDDDLDNLLAQIGDQYADLFLAAKNLSDAILLSDILRVNTEITKAPLSASMIKRYDEHHQDLTLLKALVRQQLPEKYKEIFFDQSKNGYAGYIDGGASQEEFYKFIKPILEKMDGTEELLVKLNREDLLRKQRTFDNGSIPHQIHLGELHAILRRQEDFYPFLKDNREKIEKILTFRIPYYVGPLARGNSRFAWMTRKSEETITPWNFEEVVDKGASAQSFIERMTNFDKNLPNEKVLPKHSLLYEYFTVYNELTKVKYVTEGMRKPAFLSGEQKKAIVDLLFKTNRKVTVKQLKEDYFKKIECFDSVEISGVEDRFNASLGTYHDLLKIIKDKDFLDNEENEDILEDIVLTLTLFEDREMIEERLKTYAHLFDDKVMKQLKRRRYTGWGRLSRKLINGIRDKQSGKTILDFLKSDGFANRNFMQLIHDDSLTFKEDIQKAQVSGQGDSLHEHIANLAGSPAIKKGILQTVKVVDELVKVMGRHKPENIVIEMARENQTTQKGQKNSRERMKRIEEGIKELGSQILKEHPVENTQLQNEKLYLYYLQNGRDMYVDQELDINRLSDYDVDHIVPQSFLKDDSIDNKVLTRSDKARGKSDNVPSEEVVKKMKNYWRQLLNAKLITQRKFDNLTKAERGGLSELDKAGFIKRQLVETRQITKHVAQILDSRMNTKYDENDKLIREVKVITLKSKLVSDFRKDFQFYKVREINNYHHAHDAYLNAVVGTALIKKYPKLESEFVYGDYKVYDVRKMIAKSEQEIGKATAKYFFYSNIMNFFKTEITLANGEIRKRPLIETNGETGEIVWDKGRDFATVRKVLSMPQVNIVKKTEVQTGGFSKESILPKRNSDKLIARKKDWDPKKYGGFDSPTVAYSVLVVAKVEKGKSKKLKSVKELLGITIMERSSFEKNPIDFLEAKGYKEVKKDLIIKLPKYSLFELENGRKRMLASAGELQKGNELALPSKYVNFLYLASHYEKLKGSPEDNEQKQLFVEQHKHYLDEIIEQISEFSKRVILADANLDKVLSAYNKHRDKPIREQAENIIHLFTLTNLGAPAAFKYFDTTIDRKRYTSTKEVLDATLIHQSITGLYETRIDLSQLGGDGGGGGPAPEAAAKGGTLGIEDEYRLHETSTEPDVSLGSTWLSDFPQAWAETGGMGLAVRQAPLIIPLKATSTPVSIQQYPMSHEARLGIKPHIQRLLDQGILVPCQSPWNTPLLPVKKPGTNDYRPVQDLREVNKRVEDIHPTVPNPYNLLSGLPPSHQWYTVLDLKDAFFCLRLHPTSQPLFAFEWRDPGMGISGQLTWTRLPQGFKNSPTLFNEALHRDLADFRIQHPDLILLQYVDDILLAATSELDCQQGTRALLQTLGDLGYRASAKKAQICQKQVKYLGYLLREGQRWLTEARKETVMGQPVPKTPRQLREFLGTAGFCRLWIPGFAEMAAPLYPLTKPGTLFSWGPDQQKAYQEIKQALLTAPALGLPDLTKPFELFVDEKQGYAKGVLTQKLGPWRRPVAYLSKKLDPVAAGWPPCLRMVAAIAVLTKDAGKLTMGQPLVILAPHAVEALVKQPPDRWLSNARMTHYQAMLLDTDRVQFGPVVALNPATLLPLPEEGAPHDCLEILAETHGTRPDLTDQPIPDADHTWYTDGSSFLQEGQRKAGAAVTTETEVIWAGALPAGTSAQRAELIALTQALKMAEGKRLNVYTDSRYAFATAHIHGEIYRRRGWLTSEGREIKNKSEILALLKALFLPKRLSIIHCLGHQKGDSAEARGNRLADQAAREAAIKTPPDTSTLLAGKRTADGSEFEKRTADGSEFESPKKKAKVE

SEQ ID NO: 7473 - protein, 2096 aa, synthetic construct; identical to SEQ ID NO: 7471

SEQ ID NO: 7474 - protein, 2096 aa, synthetic construct; identical to SEQ ID NO: 7472

SEQ ID NO: 7475 - protein, 2096 aa, synthetic construct
MPAAKRVKLDGGDKKYSIGLDIGTNSVGWAVITDEYKVPSKKFKVLGNTDRHSIKKNLIGALLFDSGETAEATRLKRTARRRYTRRKNRICYLQEIFSNEMAKVDDSFFHRLEESFLVEEDKKHERHPIFGNIVDEVAYHEKYPTIYHLRKKLVDSTDKADLRLIYLALAHMIKFRGHFLIEGDLNPDNSDVDKLFIQLVQTYNQLFEENPINASGVDAKAILSARLSKSRRLENLIAQLPGEKKNGLFGNLIALSLGLTPNFKSNFDLAEDAKLQLSKDTYDDDLDNLLAQIGDQYADLFLAAKNLSDAILLSDILRVNTEITKAPLSASMIKRYDEHHQDLTLLKALVRQQLPEKYKEIFFDQSKNGYAGYIDGGASQEEFYKFIKPILEKMDGTEELLVKLNREDLLRKQRTFDNGSIPHQIHLGELHAILRRQEDFYPFLKDNREKIEKILTFRIPYYVGPLARGNSRFAWMTRKSEETITPWNFEEVVDKGASAQSFIERMTNFDKNLPNEKVLPKHSLLYEYFTVYNELTKVKYVTEGMRKPAFLSGEQKKAIVDLLFKTNRKVTVKQLKEDYFKKIECFDSVEISGVEDRFNASLGTYHDLLKIIKDKDFLDNEENEDILEDIVLTLTLFEDREMIEERLKTYAHLFDDKVMKQLKRRRYTGWGRLSRKLINGIRDKQSGKTILDFLKSDGFANRNFMQLIHDDSLTFKEDIQKAQVSGQGDSLHEHIANLAGSPAIKKGILQTVKVVDELVKVMGRHKPENIVIEMARENQTTQKGQKNSRERMKRIEEGIKELGSQILKEHPVENTQLQNEKLYLYYLQNGRDMYVDQELDINRLSDYDVDHIVPQSFLKDDSIDNKVLTRSDKARGKSDNVPSEEVVKKMKNYWRQLLNAKLITQRKFDNLTKAERGGLSELDKAGFIKRQLVETRQITKHVAQILDSRMNTKYDENDKLIREVKVITLKSKLVSDFRKDFQFYKVREINNYHHAHDAYLNAVVGTALIKKYPKLESEFVYGDYKVYDVRKMIAKSEQEIGKATAKYFFYSNIMNFFKTEITLANGEIRKRPLIETNGETGEIVWDKGRDFATVRKVLSMPQVNIVKKTEVQTGGFSKESILPKRNSDKLIARKKDWDPKKYGGFDSPTVAYSVLVVAKVEKGKSKKLKSVKELLGITIMERSSFEKNPIDFLEAKGYKEVKKDLIIKLPKYSLFELENGRKRMLASAGELQKGNELALPSKYVNFLYLASHYEKLKGSPEDNEQKQLFVEQHKHYLDEIIEQISEFSKRVILADANLDKVLSAYNKHRDKPIREQAENIIHLFTLTNLGAPAAFKYFDTTIDRKRYTSTKEVLDATLIHQSITGLYETRIDLSQLGGDGGGGGPAPEAAAKGGTLNIEDEYRLHETSKEPDVSLGSTWLSDFPQAWAETGGMGLAVRQAPLIIPLKATSTPVSIKQYPMSQEARLGIKPHIQRLLDQGILVPCQSPWNTPLLPVKKPGTNDYRPVQDLREVNKRVEDIHPTVPNPYNLLSGLPPSHQWYTVLDLKDAFFCLRLHPTSQPLFAFEWRDPEMGISGQLTWTRLPQGFKNSPTLFNEALHRDLAGFRIQHPDLILLQYVDDLLLAATSELDCQQGTRALLQTLGDLGYRASAKKAQICQKQVKYLGYLLKEGQRWLTEARKETVMGQPIPKTPRQLREFLGTAGFCRLWIPGFAEMAAPLYPLTKPGTLFNWGPDQQKAFQEIKQALLTAPALGLPDLTKPFELFVDEKQGYAKGVLTQKLGPWRRPVAYLSKKLDPVAAGWPPCLRMVAAIAVLTKDAGKLTMGQPLVILAPHAVEALVKQPPDRWLSNARMTHYQALLLDTDRVQFGPVVALNPATLLPLPEEGLQHDCLDILAEAHGTRSDLMDQPLPDADHTWYTDGSSFLQEGQRKAGAAVTTETEVIWARALPAGTSAQRAELIALTQALKMAEGKKLNVYTDSRYAFATAHIHGEIYRRRGWLTSEGKEIKNKDEILALLKALFLPKRLSIIHCPGHQKGNSAEARGNRMADQAAREVATRETPETSTLLAGKRTADGSEFEKRTADGSEFESPKKKAKVE

SEQ ID NO: 7476 - protein, 2096 aa, synthetic construct; identical to SEQ ID NO: 4534

SEQ ID NO: 7477 - protein, 2096 aa, synthetic construct
MPAAKRVKLDGGDKKYSIGLDIGTNSVGWAVITDEYKVPSKKFKVLGNTDRHSIKKNLIGALLFDSGETAEATRLKRTARRRYTRRKNRICYLQEIFSNEMAKVDDSFFHRLEESFLVEEDKKHERHPIFGNIVDEVAYHEKYPTIYHLRKKLVDSTDKADLRLIYLALAHMIKFRGHFLIEGDLNPDNSDVDKLFIQLVQTYNQLFEENPINASGVDAKAILSARLSKSRRLENLIAQLPGEKKNGLFGNLIALSLGLTPNFKSNFDLAEDAKLQLSKDTYDDDLDNLLAQIGDQYADLFLAAKNLSDAILLSDILRVNTEITKAPLSASMIKRYDEHHQDLTLLKALVRQQLPEKYKEIFFDQSKNGYAGYIDGGASQEEFYKFIKPILEKMDGTEELLVKLNREDLLRKQRTFDNGSIPHQIHLGELHAILRRQEDFYPFLKDNREKIEKILTFRIPYYVGPLARGNSRFAWMTRKSEETITPWNFEEVVDKGASAQSFIERMTNFDKNLPNEKVLPKHSLLYEYFTVYNELTKVKYVTEGMRKPAFLSGEQKKAIVDLLFKTNRKVTVKQLKEDYFKKIECFDSVEISGVEDRFNASLGTYHDLLKIIKDKDFLDNEENEDILEDIVLTLTLFEDREMIEERLKTYAHLFDDKVMKQLKRRRYTGWGRLSRKLINGIRDKQSGKTILDFLKSDGFANRNFMQLIHDDSLTFKEDIQKAQVSGQGDSLHEHIANLAGSPAIKKGILQTVKVVDELVKVMGRHKPENIVIEMARENQTTQKGQKNSRERMKRIEEGIKELGSQILKEHPVENTQLQNEKLYLYYLQNGRDMYVDQELDINRLSDYDVDHIVPQSFLKDDSIDNKVLTRSDKARGKSDNVPSEEVVKKMKNYWRQLLNAKLITQRKFDNLTKAERGGLSELDKAGFIKRQLVETRQITKHVAQILDSRMNTKYDENDKLIREVKVITLKSKLVSDFRKDFQFYKVREINNYHHAHDAYLNAVVGTALIKKYPKLESEFVYGDYKVYDVRKMIAKSEQEIGKATAKYFFYSNIMNFFKTEITLANGEIRKRPLIETNGETGEIVWDKGRDFATVRKVLSMPQVNIVKKTEVQTGGFSKESILPKRNSDKLIARKKDWDPKKYGGFDSPTVAYSVLVVAKVEKGKSKKLKSVKELLGITIMERSSFEKNPIDFLEAKGYKEVKKDLIIKLPKYSLFELENGRKRMLASAGELQKGNELALPSKYVNFLYLASHYEKLKGSPEDNEQKQLFVEQHKHYLDEIIEQISEFSKRVILADANLDKVLSAYNKHRDKPIREQAENIIHLFTLTNLGAPAAFKYFDTTIDRKRYTSTKEVLDATLIHQSITGLYETRIDLSQLGGDGGGGGPAPEAAAKGGTLNIEDEHRLHETSKEPDVSLGSTWLSDFPQAWAETGGMGLAVRQAPLIIPLKATSTPVSIKQYPMSQEARLGIKPHIQRLLDQGILVPCQSPWNTPLLPVKKPGTNDYRPVQDLREVNKRVEDIHPTVPNPYNLLSGLPPSHQWYTVLDLKDAFFCLRLHPTSQPLFAFEWRDPEMGISGQLTWTRLPQGFKNSPTLFDEALHRDLADFRIQHPDLILLQYVDDLLLAATSELDCQQGTRALLQTLGNLGYRASAKKAQICQKQVKYLGYLLKEGQRWLTEARKETVMGQPTPKTPRQLREFLGTAGFCRLWIPGFAEMAAPLYPLTKTGTLFNWGPDQQKAYQEIKQALLTAPALGLPDLTKPFELFVDEKQGYAKGVLTQKLGPWRRPVAYLSKKLDPVAAGWPPCLRMVAAIAVLTKDAGKLTMGQPLVILAPHAVEALVKQPPDRWLSNARMTHYQALLLDTDRVQFGPVVALNPATLLPLPEEGLQHNCLDILAEAHGTRPDLTDQPLPDADHTWYTDGSSLLQEGQRKAGAAVTTETEVIWAKALPAGTSAQRAELIALTQALKMAEGKKLNVYTDSRYAFATAHIHGEIYRRRGLLTSEGKEIKNKDEILALLKALFLPKRLSIIHCPGHQKGHSAEARGNRMADQAARKAAITETPDTSTLLAGKRTADGSEFEKRTADGSEFESPKKKAKVE

SEQ ID NO: 7478 - protein, 2096 aa, synthetic construct; identical to SEQ ID NO: 4534

SEQ ID NO: 7479 - protein, 2088 aa, synthetic construct
MPAAKRVKLDGGDKKYSIGLDIGTNSVGWAVITDEYKVPSKKFKVLGNTDRHSIKKNLIGALLFDSGETAEATRLKRTARRRYTRRKNRICYLQEIFSNEMAKVDDSFFHRLEESFLVEEDKKHERHPIFGNIVDEVAYHEKYPTIYHLRKKLVDSTDKADLRLIYLALAHMIKFRGHFLIEGDLNPDNSDVDKLFIQLVQTYNQLFEENPINASGVDAKAILSARLSKSRRLENLIAQLPGEKKNGLFGNLIALSLGLTPNFKSNFDLAEDAKLQLSKDTYDDDLDNLLAQIGDQYADLFLAAKNLSDAILLSDILRVNTEITKAPLSASMIKRYDEHHQDLTLLKALVRQQLPEKYKEIFFDQSKNGYAGYIDGGASQEEFYKFIKPILEKMDGTEELLVKLNREDLLRKQRTFDNGSIPHQIHLGELHAILRRQEDFYPFLKDNREKIEKILTFRIPYYVGPLARGNSRFAWMTRKSEETITPWNFEEVVDKGASAQSFIERMTNFDKNLPNEKVLPKHSLLYEYFTVYNELTKVKYVTEGMRKPAFLSGEQKKAIVDLLFKTNRKVTVKQLKEDYFKKIECFDSVEISGVEDRFNASLGTYHDLLKIIKDKDFLDNEENEDILEDIVLTLTLFEDREMIEERLKTYAHLFDDKVMKQLKRRRYTGWGRLSRKLINGIRDKQSGKTILDFLKSDGFANRNFMQLIHDDSLTFKEDIQKAQVSGQGDSLHEHIANLAGSPAIKKGILQTVKVVDELVKVMGRHKPENIVIEMARENQTTQKGQKNSRERMKRIEEGIKELGSQILKEHPVENTQLQNEKLYLYYLQNGRDMYVDQELDINRLSDYDVDHIVPQSFLKDDSIDNKVLTRSDKARGKSDNVPSEEVVKKMKNYWRQLLNAKLITQRKFDNLTKAERGGLSELDKAGFIKRQLVETRQITKHVAQILDSRMNTKYDENDKLIREVKVITLKSKLVSDFRKDFQFYKVREINNYHHAHDAYLNAVVGTALIKKYPKLESEFVYGDYKVYDVRKMIAKSEQEIGKATAKYFFYSNIMNFFKTEITLANGEIRKRPLIETNGETGEIVWDKGRDFATVRKVLSMPQVNIVKKTEVQTGGFSKESILPKRNSDKLIARKKDWDPKKYGGFDSPTVAYSVLVVAKVEKGKSKKLKSVKELLGITIMERSSFEKNPIDFLEAKGYKEVKKDLIIKLPKYSLFELENGRKRMLASAGELQKGNELALPSKYVNFLYLASHYEKLKGSPEDNEQKQLFVEQHKHYLDEIIEQISEFSKRVILADANLDKVLSAYNKHRDKPIREQAENIIHLFTLTNLGAPAAFKYFDTTIDRKRYTSTKEVLDATLIHQSITGLYETRIDLSQLGGDGGGGGPAPEAAAKGGLDDEYRLYSPLVKPDQNIQFWLEQFPQAWAETAGMGLAKQVPPQVIQLKASATPVSVRQYPLSKEAQEGIRPHVQRLIQQGILVPVQSPWNTPLLPVRKPGTNDYRPVQDLREVNKRVQDIHPTVPNPYNLLCALPPQRSWYTVLDLKDAFFCLRLHPTSQPLFAFEWRDPGTGRTGQLTWTRLPQGFKNSPTIFNEALHRDLANFRIQHPQVTLLQYVDDLLLAGATKQDCLEGTKALLLELSDLGYRASAKKAQICRREVTYLGYSLRDGQRWLTEARKKTVVQIPAPTTAKQVREFLGKAGFCRLFIPGFATLAAPLYPLTKPKGEFSWAPEHQKAFDAIKKALLSAPALALPDVTKPFTLYVDERKGVARGVLTQTLGPWRRPVAYLSKKLDPVASGWPVCLKAIAAVAILVKDADKLTLGQNITVIAPHALENIVRQPPDRWMTNARMTHYQSLLLTERVTFAPPAALNPATLLPEETDEPVTHDCHQLLIEETGVRKDLTDIPLTGEVLTWFTDGSSYVVEGKRMAGAAVVDGTRTIWASSLPEGTSAQKAELMALTQALRLAEGKSINIYTDSRYAFATAHVHGAIYKQRGWLTSAGREIKNKEEILSLLEALHLPKRLAIIHCPGHQKAKDPISRGNQMADRVAKQAAQGVNLLPAGKRTADGSEFEKRTADGSEFESPKKKAKVE

SEQ ID NO: 7480 - protein, 2088 aa, synthetic construct; identical to SEQ ID NO: 7479

SEQ ID NO: 7481 - protein, 2090 aa, synthetic construct
MPAAKRVKLDGGDKKYSIGLDIGTNSVGWAVITDEYKVPSKKFKVLGNTDRHSIKKNLIGALLFDSGETAEATRLKRTARRRYTRRKNRICYLQEIFSNEMAKVDDSFFHRLEESFLVEEDKKHERHPIFGNIVDEVAYHEKYPTIYHLRKKLVDSTDKADLRLIYLALAHMIKFRGHFLIEGDLNPDNSDVDKLFIQLVQTYNQLFEENPINASGVDAKAILSARLSKSRRLENLIAQLPGEKKNGLFGNLIALSLGLTPNFKSNFDLAEDAKLQLSKDTYDDDLDNLLAQIGDQYADLFLAAKNLSDAILLSDILRVNTEITKAPLSASMIKRYDEHHQDLTLLKALVRQQLPEKYKEIFFDQSKNGYAGYIDGGASQEEFYKFIKPILEKMDGTEELLVKLNREDLLRKQRTFDNGSIPHQIHLGELHAILRRQEDFYPFLKDNREKIEKILTFRIPYYVGPLARGNSRFAWMTRKSEETITPWNFEEVVDKGASAQSFIERMTNFDKNLPNEKVLPKHSLLYEYFTVYNELTKVKYVTEGMRKPAFLSGEQKKAIVDLLFKTNRKVTVKQLKEDYFKKIECFDSVEISGVEDRFNASLGTYHDLLKIIKDKDFLDNEENEDILEDIVLTLTLFEDREMIEERLKTYAHLFDDKVMKQLKRRRYTGWGRLSRKLINGIRDKQSGKTILDFLKSDGFANRNFMQLIHDDSLTFKEDIQKAQVSGQGDSLHEHIANLAGSPAIKKGILQTVKVVDELVKVMGRHKPENIVIEMARENQTTQKGQKNSRERMKRIEEGIKELGSQILKEHPVENTQLQNEKLYLYYLQNGRDMYVDQELDINRLSDYDVDHIVPQSFLKDDSIDNKVLTRSDKARGKSDNVPSEEVVKKMKNYWRQLLNAKLITQRKFDNLTKAERGGLSELDKAGFIKRQLVETRQITKHVAQILDSRMNTKYDENDKLIREVKVITLKSKLVSDFRKDFQFYKVREINNYHHAHDAYLNAVVGTALIKKYPKLESEFVYGDYKVYDVRKMIAKSEQEIGKATAKYFFYSNIMNFFKTEITLANGEIRKRPLIETNGETGEIVWDKGRDFATVRKVLSMPQVNIVKKTEVQTGGFSKESILPKRNSDKLIARKKDWDPKKYGGFDSPTVAYSVLVVAKVEKGKSKKLKSVKELLGITIMERSSFEKNPIDFLEAKGYKEVKKDLIIKLPKYSLFELENGRKRMLASAGELQKGNELALPSKYVNFLYLASHYEKLKGSPEDNEQKQLFVEQHKHYLDEIIEQISEFSKRVILADANLDKVLSAYNKHRDKPIREQAENIIHLFTLTNLGAPAAFKYFDTTIDRKRYTSTKEVLDATLIHQSITGLYETRIDLSQLGGDGGGGGPAPEAAAKGGTLQLDDEYRLYSPLVKPDQNIQFWLEQFPQAWAETAGMGLAKQVPPQVIQLKASATPVSVRQYPLSKEAQEGIRPHVQRLIQQGILVPVQSPWNTPLLPVRKPGTNDYRPVQDLREVNKRVQDIHPTVPNPYNLLCALPPQRSWYTVLDLKDAFFCLRLHPTSQPLFAFEWRDPGTGRTGQLTWTRLPQGFKNSPTIFDEALHRDLANFRIQHPQVTLLQYVDDLLLAGATKQDCLEGTKALLLELSDLGYRASAKKAQICRREVTYLGYSLRDGQRWLTEARKKTVVQIPAPTTAKQVREFLGTAGFCRLWIPGFATLAAPLYPLTKEKGEFSWAPEHQKAFDAIKKALLSAPALALPDVTKPFTLYVDERKGVARGVLTQTLGPWRRPVAYLSKKLDPVASGWPVCLKAIAAVAILVKDADKLTLGQNITVIAPHALENIVRQPPDRWMTNARMTHYQSLLLTERVTFAPPAALNPATLLPEETDEPVTHDCHQLLIEETGVRKDLTDIPLTGEVLTWFTDGSSYVVEGKRMAGAAVVDGTRTIWASSLPEGTSAQKAELMALTQALRLAEGKSINIYTDSRYAFATAHVHGAIYKQRGLLTSAGREIKNKEEILSLLEALHLPKRLAIIHCPGHQKAKDPISRGNQMADRVAKQAAQGVNLLAGKRTADGSEFEKRTADGSEFESPKKKAKVE

SEQ ID NO: 7482 - protein, 2176 aa, synthetic construct
MPAAKRVKLDGGDKKYSIGLDIGTNSVGWAVITDEYKVPSKKFKVLGNTDRHSIKKNLIGALLFDSGETAEATRLKRTARRRYTRRKNRICYLQEIFSNEMAKVDDSFFHRLEESFLVEEDKKHERHPIFGNIVDEVAYHEKYPTIYHLRKKLVDSTDKADLRLIYLALAHMIKFRGHFLIEGDLNPDNSDVDKLFIQLVQTYNQLFEENPINASGVDAKAILSARLSKSRRLENLIAQLPGEKKNGLFGNLIALSLGLTPNFKSNFDLAEDAKLQLSKDTYDDDLDNLLAQIGDQYADLFLAAKNLSDAILLSDILRVNTEITKAPLSASMIKRYDEHHQDLTLLKALVRQQLPEKYKEIFFDQSKNGYAGYIDGGASQEEFYKFIKPILEKMDGTEELLVKLNREDLLRKQRTFDNGSIPHQIHLGELHAILRRQEDFYPFLKDNREKIEKILTFRIPYYVGPLARGNSRFAWMTRKSEETITPWNFEEVVDKGASAQSFIERMTNFDKNLPNEKVLPKHSLLYEYFTVYNELTKVKYVTEGMRKPAFLSGEQKKAIVDLLFKTNRKVTVKQLKEDYFKKIECFDSVEISGVEDRFNASLGTYHDLLKIIKDKDFLDNEENEDILEDIVLTLTLFEDREMIEERLKTYAHLFDDKVMKQLKRRRYTGWGRLSRKLINGIRDKQSGKTILDFLKSDGFANRNFMQLIHDDSLTFKEDIQKAQVSGQGDSLHEHIANLAGSPAIKKGILQTVKVVDELVKVMGRHKPENIVIEMARENQTTQKGQKNSRERMKRIEEGIKELGSQILKEHPVENTQLQNEKLYLYYLQNGRDMYVDQELDINRLSDYDVDHIVPQSFLKDDSIDNKVLTRSDKARGKSDNVPSEEVVKKMKNYWRQLLNAKLITQRKFDNLTKAERGGLSELDKAGFIKRQLVETRQITKHVAQILDSRMNTKYDENDKLIREVKVITLKSKLVSDFRKDFQFYKVREINNYHHAHDAYLNAVVGTALIKKYPKLESEFVYGDYKVYDVRKMIAKSEQEIGKATAKYFFYSNIMNFFKTEITLANGEIRKRPLIETNGETGEIVWDKGRDFATVRKVLSMPQVNIVKKTEVQTGGFSKESILPKRNSDKLIARKKDWDPKKYGGFDSPTVAYSVLVVAKVEKGKSKKLKSVKELLGITIMERSSFEKNPIDFLEAKGYKEVKKDLIIKLPKYSLFELENGRKRMLASAGELQKGNELALPSKYVNFLYLASHYEKLKGSPEDNEQKQLFVEQHKHYLDEIIEQISEFSKRVILADANLDKVLSAYNKHRDKPIREQAENIIHLFTLTNLGAPAAFKYFDTTIDRKRYTSTKEVLDATLIHQSITGLYETRIDLSQLGGDGGGGGPAPEAAAKGGMDPLQLLQPLEAEIKGTKLKAHWNSGATITCVPEAFLEDERPIQTMLIKTIHGEKQQDVYYLTFKVQGRKVEAEVLASPYDYILLNPSDVPWLMKKPLQLTVLVPLHEYQERLLQQTALPKEQKELLQKLFLKYDALWQHWENQVGHRRIKPHNIATGTLAPRPQKQYPINPKAKPSIQIVIDDLLKQGVLIQQNSTMNTPVYPVPKPDGKWRMVLDYREVNKTIPLIAAQNQHSAGILSSIYRGKYKTTLDLTNGFWAHPITPESYWLTAFTWQGKQYCWTRLPQGFLNSPALFNADVVDLLKEIPNVQAYVDDIYISHDDPQEHLEQLEKIFSILLNAGYVVSLKKSEIAQREVEFLGFNITKEGRGLTDTFKQKLLNITPPKDLKQLQSILGKLNFARNFIPNYSELVKPLYTIVAPANGKFISWTEDNSNQLQHIISVLNQADNLEERNPETRLIIKVNSSPSAGYIRYYNEGSKRPIMYVNYIFSKAEAKFTQTEKLLTTMHKGLIKAMDLAMGQEILVYSPIVSMTKIQRTPLPERKALPVRWITWMTYLEDPRIQFHYDKSLPELQQIPNVTEDVIAKTKHPSEFAMVFYTDGSAIKHPDVNKSHSAGMGIAQVQFIPEYKIVHQWSIPLGDHTAQLAEIAAVEFACKKALKISGPVLIVTDSFYVAESANKELPYWKSNGFLNNKKKPLRHVSKWKSIAECLQLKPDIIIMHEKGHQQPMTTLHTEGNNLADKLATQGSYVVHAGKRTADGSEFEKRTADGSEFESPKKKAKVE

SEQ ID NO: 7483 - protein, 2176 aa, synthetic construct
MPAAKRVKLDGGDKKYSIGLDIGTNSVGWAVITDEYKVPSKKFKVLGNTDRHSIKKNLIGALLFDSGETAEATRLKRTARRRYTRRKNRICYLQEIFSNEMAKVDDSFFHRLEESFLVEEDKKHERHPIFGNIVDEVAYHEKYPTIYHLRKKLVDSTDKADLRLIYLALAHMIKFRGHFLIEGDLNPDNSDVDKLFIQLVQTYNQLFEENPINASGVDAKAILSARLSKSRRLENLIAQLPGEKKNGLFGNLIALSLGLTPNFKSNFDLAEDAKLQLSKDTYDDDLDNLLAQIGDQYADLFLAAKNLSDAILLSDILRVNTEITKAPLSASMIKRYDEHHQDLTLLKALVRQQLPEKYKEIFFDQSKNGYAGYIDGGASQEEFYKFIKPILEKMDGTEELLVKLNREDLLRKQRTFDNGSIPHQIHLGELHAILRRQEDFYPFLKDNREKIEKILTFRIPYYVGPLARGNSRFAWMTRKSEETITPWNFEEVVDKGASAQSFIERMTNFDKNLPNEKVLPKHSLLYEYFTVYNELTKVKYVTEGMRKPAFLSGEQKKAIVDLLFKTNRKVTVKQLKEDYFKKIECFDSVEISGVEDRFNASLGTYHDLLKIIKDKDFLDNEENEDILEDIVLTLTLFEDREMIEERLKTYAHLFDDKVMKQLKRRRYTGWGRLSRKLINGIRDKQSGKTILDFLKSDGFANRNFMQLIHDDSLTFKEDIQKAQVSGQGDSLHEHIANLAGSPAIKKGILQTVKVVDELVKVMGRHKPENIVIEMARENQTTQKGQKNSRERMKRIEEGIKELGSQILKEHPVENTQLQNEKLYLYYLQNGRDMYVDQELDINRLSDYDVDHIVPQSFLKDDSIDNKVLTRSDKARGKSDNVPSEEVVKKMKNYWRQLLNAKLITQRKFDNLTKAERGGLSELDKAGFIKRQLVETRQITKHVAQILDSRMNTKYDENDKLIREVKVITLKSKLVSDFRKDFQFYKVREINNYHHAHDAYLNAVVGTALIKKYPKLESEFVYGDYKVYDVRKMIAKSEQEIGKATAKYFFYSNIMNFFKTEITLANGEIRKRPLIETNGETGEIVWDKGRDFATVRKVLSMPQVNIVKKTEVQTGGFSKESILPKRNSDKLIARKKDWDPKKYGGFDSPTVAYSVLVVAKVEKGKSKKLKSVKELLGITIMERSSFEKNPIDFLEAKGYKEVKKDLIIKLPKYSLFELENGRKRMLASAGELQKGNELALPSKYVNFLYLASHYEKLKGSPEDNEQKQLFVEQHKHYLDEIIEQISEFSKRVILADANLDKVLSAYNKHRDKPIREQAENIIHLFTLTNLGAPAAFKYFDTTIDRKRYTSTKEVLDATLIHQSITGLYETRIDLSQLGGDGGGGGPAPEAAAKGGMNPLQLLQPLPAEVKGTKLLAHWNSGATITCIPESFLEDEQPIKQTLIKTIHGEKQQNVYYLTFKVKGRKVEAEVIASPYEYILLSPTDVPWLTQQPLQLTILVPLQEYQDRILNKTALPEEQKQQLKALFTKYDNLWQHWENQVGHRKIRPHNIATGDYPPRPQKQYPINPKAKPSIQIVIDDLLKQGVLTPQNSTMNTPVYPVPKPDGRWRMVLDYREVNKTIPLTAAQNQHSAGILATIVRQKYKTTLDLANGFWAHPITPDSYWLTAFTWQGKQYCWTRLPQGFLNSPALFNADAVDLLKEVPNVQVYVDDIYLSHDNPHEHIQQLEKVFQILLQAGYVVSLKKSEIGQRTVEFLGFNITKEGRGLTDTFKTKLLNVTPPKDLKQLQSILGLLNFARNFIPNFAELVQTLYNLIASSPGKYIEWTEDNTKQLNKVIEALNTASNLEERLPDQRLVIKVNTSPSAGYVRYYNESGKKPIMYLNYVFSKAELKFSMLEKLLTTMHKALIKAMDLAMGQEILVYSPIVSMTKIQKTPLPERKALPIRWITWMTYLEDPRIQFHYDKTLPELKHIPDVYTSSIPPLKHPSQYEGVFCTDGSAIKSPDPTKSNNAGMGIVHAIYNPEYKILNQWSIPLGHHTAQMAEIAAVEFACKKALKVPGPVLVITDSFYVAESANKELPYWKSNGFVNNKKEPLKHISKWKSIAECLSIKPDITIQHEKGHQPINTSIHTEGNALADKLATQGSYVVNAGKRTADGSEFEKRTADGSEFESPKKKAKVE

SEQ ID NO: 7484 - protein, 2094 aa, synthetic construct
MPAAKRVKLDGGDKKYSIGLDIGTNSVGWAVITDEYKVPSKKFKVLGNTDRHSIKKNLIGALLFDSGETAEATRLKRTARRRYTRRKNRICYLQEIFSNEMAKVDDSFFHRLEESFLVEEDKKHERHPIFGNIVDEVAYHEKYPTIYHLRKKLVDSTDKADLRLIYLALAHMIKFRGHFLIEGDLNPDNSDVDKLFIQLVQTYNQLFEENPINASGVDAKAILSARLSKSRRLENLIAQLPGEKKNGLFGNLIALSLGLTPNFKSNFDLAEDAKLQLSKDTYDDDLDNLLAQIGDQYADLFLAAKNLSDAILLSDILRVNTEITKAPLSASMIKRYDEHHQDLTLLKALVRQQLPEKYKEIFFDQSKNGYAGYIDGGASQEEFYKFIKPILEKMDGTEELLVKLNREDLLRKQRTFDNGSIPHQIHLGELHAILRRQEDFYPFLKDNREKIEKILTFRIPYYVGPLARGNSRFAWMTRKSEETITPWNFEEVVDKGASAQSFIERMTNFDKNLPNEKVLPKHSLLYEYFTVYNELTKVKYVTEGMRKPAFLSGEQKKAIVDLLFKTNRKVTVKQLKEDYFKKIECFDSVEISGVEDRFNASLGTYHDLLKIIKDKDFLDNEENEDILEDIVLTLTLFEDREMIEERLKTYAHLFDDKVMKQLKRRRYTGWGRLSRKLINGIRDKQSGKTILDFLKSDGFANRNFMQLIHDDSLTFKEDIQKAQVSGQGDSLHEHIANLAGSPAIKKGILQTVKVVDELVKVMGRHKPENIVIEMARENQTTQKGQKNSRERMKRIEEGIKELGSQILKEHPVENTQLQNEKLYLYYLQNGRDMYVDQELDINRLSDYDVDHIVPQSFLKDDSIDNKVLTRSDKARGKSDNVPSEEVVKKMKNYWRQLLNAKLITQRKFDNLTKAERGGLSELDKAGFIKRQLVETRQITKHVAQILDSRMNTKYDENDKLIREVKVITLKSKLVSDFRKDFQFYKVREINNYHHAHDAYLNAVVGTALIKKYPKLESEFVYGDYKVYDVRKMIAKSEQEIGKATAKYFFYSNIMNFFKTEITLANGEIRKRPLIETNGETGEIVWDKGRDFATVRKVLSMPQVNIVKKTEVQTGGFSKESILPKRNSDKLIARKKDWDPKKYGGFDSPTVAYSVLVVAKVEKGKSKKLKSVKELLGITIMERSSFEKNPIDFLEAKGYKEVKKDLIIKLPKYSLFELENGRKRMLASAGELQKGNELALPSKYVNFLYLASHYEKLKGSPEDNEQKQLFVEQHKHYLDEIIEQISEFSKRVILADANLDKVLSAYNKHRDKPIREQAENIIHLFTLTNLGAPAAFKYFDTTIDRKRYTSTKEVLDATLIHQSITGLYETRIDLSQLGGDGGGGGPAPEAAAKGGVLNLEEEYRLHEKPVPSSIDPSWLQLFPTVWAERAGMGLANQVPPVVVELRSGASPVAVRQYPMSKEAREGIRPHIQRFLDLGVLVPCQSPWNTPLLPVKKPGTNDYRPVQDLREINKRVQDIHPTVPNPYNLLSSLPPSHTWYSVLDLKDAFFCLKLHPNSQPLFAFEWRDPEKGNTGQLTWTRLPQGFKNSPTLFNEALHRDLAPFRALNPQVVLLQYVDDLLVAAPTYRDCKEGTQKLLQELSKLGYRVSAKKAQLCQKEVTYLGYLLKEGKRWLTPARKATVMKIPPPTTPRQVREFLGKAGFCRLFIPGFASLAAPLYPLTKPSIPFIWTEEHQKAFDRIKEALLSAPALALPDLTKPFTLYVDERAGVARGVLTQTLGPWRRPVAYLSKKLDPVASGWPTCLKAVAAVALLLKDADKLTLGQNVTVIASHSLESIVRQPPDRWMTNARMTHYQSLLLNERVSFAPPAVLNPATLLPVESEATPVHRCSEILAEETGTRRDLKDQPLPGVPAWYTDGSSFIAEGKRRAGAAIVDGKRTVWASSLPEGTSAQKAELVALTQALRLAEGKDINIYTDSRYAFATAHIHGAIYKQRGWLTSAGKDIKNKEEILALLEAIHLPKRVAIIHCPGHQKGNDPVATGNRRADEAAKQAALSTRVLAETTKPAGKRTADGSEFEKRTADGSEFESPKKKAKVE

SEQ ID NO: 7485 - protein, 2096 aa, synthetic construct
MPAAKRVKLDGGDKKYSIGLDIGTNSVGWAVITDEYKVPSKKFKVLGNTDRHSIKKNLIGALLFDSGETAEATRLKRTARRRYTRRKNRICYLQEIFSNEMAKVDDSFFHRLEESFLVEEDKKHERHPIFGNIVDEVAYHEKYPTIYHLRKKLVDSTDKADLRLIYLALAHMIKFRGHFLIEGDLNPDNSDVDKLFIQLVQTYNQLFEENPINASGVDAKAILSARLSKSRRLENLIAQLPGEKKNGLFGNLIALSLGLTPNFKSNFDLAEDAKLQLSKDTYDDDLDNLLAQIGDQYADLFLAAKNLSDAILLSDILRVNTEITKAPLSASMIKRYDEHHQDLTLLKALVRQQLPEKYKEIFFDQSKNGYAGYIDGGASQEEFYKFIKPILEKMDGTEELLVKLNREDLLRKQRTFDNGSIPHQIHLGELHAILRRQEDFYPFLKDNREKIEKILTFRIPYYVGPLARGNSRFAWMTRKSEETITPWNFEEVVDKGASAQSFIERMTNFDKNLPNEKVLPKHSLLYEYFTVYNELTKVKYVTEGMRKPAFLSGEQKKAIVDLLFKTNRKVTVKQLKEDYFKKIECFDSVEISGVEDRFNASLGTYHDLLKIIKDKDFLDNEENEDILEDIVLTLTLFEDREMIEERLKTYAHLFDDKVMKQLKRRRYTGWGRLSRKLINGIRDKQSGKTILDFLKSDGFANRNFMQLIHDDSLTFKEDIQKAQVSGQGDSLHEHIANLAGSPAIKKGILQTVKVVDELVKVMGRHKPENIVIEMARENQTTQKGQKNSRERMKRIEEGIKELGSQILKEHPVENTQLQNEKLYLYYLQNGRDMYVDQELDINRLSDYDVDHIVPQSFLKDDSIDNKVLTRSDKARGKSDNVPSEEVVKKMKNYWRQLLNAKLITQRKFDNLTKAERGGLSELDKAGFIKRQLVETRQITKHVAQILDSRMNTKYDENDKLIREVKVITLKSKLVSDFRKDFQFYKVREINNYHHAHDAYLNAVVGTALIKKYPKLESEFVYGDYKVYDVRKMIAKSEQEIGKATAKYFFYSNIMNFFKTEITLANGEIRKRPLIETNGETGEIVWDKGRDFATVRKVLSMPQVNIVKKTEVQTGGFSKESILPKRNSDKLIARKKDWDPKKYGGFDSPTVAYSVLVVAKVEKGKSKKLKSVKELLGITIMERSSFEKNPIDFLEAKGYKEVKKDLIIKLPKYSLFELENGRKRMLASAGELQKGNELALPSKYVNFLYLASHYEKLKGSPEDNEQKQLFVEQHKHYLDEIIEQISEFSKRVILADANLDKVLSAYNKHRDKPIREQAENIIHLFTLTNLGAPAAFKYFDTTIDRKRYTSTKEVLDATLIHQSITGLYETRIDLSQLGGDGGGGGPAPEAAAKGGTLNIEDEYRLHETSKEPDVPLGSTWLSDFPQAWAETGGMGLAVRQAPLIIPLKATSTPVSIKQYPMSQEARLGIKPHIQRLLDQGILVPCQSPWNTPLLPVKKPGTNDYRPVQDLREVNKRVEDIHPTVPNPYNLLSGLPPSHQWYTVLDLKDAFFCLRLHPTSQPLFAFEWRDPEMGISGQLTWTRLPQGFKNSPTLFNEALHRDLADFRIQHPDLILLQYVDDLLLAATSEQDCQRGTRALLQTLGNLGYRASAKKAQICQKQVKYLGYLLKEGQRWLTEARKETVMGQPTPKTPRQLREFLGTAGFCRLWIPGFAEMAAPLYPLTKPGTLFNWGPDQQKAYQEIKQALLTAPALGLPDLTKPFELFVDEKQGYAKGVLTQKLGPWRRPVAYLSKKLDPVAAGWPPCLRMVAAIAVLTKDAGKLTMGQPLVILAPHAVEALVKQPPDRWLSNARMTHYQAMLLDTDRVQFGPVVALNPATLLPLPEKEAPHDCLEILAETHGTRPDLTDQPIPDADYTWYTDGSSFLQEGQRRAGAAVTTETEVIWARALPAGTSAQRAELIALTQALKMAEGKKLNVYTDSRYAFATAHVHGEIYRRRGWLTSEGREIKNKNEILALLKALFLPKRLSIIHCPGHQKGNSAEARGNRMADQAAREAAMKAVLETSTLLAGKRTADGSEFEKRTADGSEFESPKKKAKVE

SEQ ID NO: 7486 - protein, 2098 aa, synthetic construct
MPAAKRVKLDGGDKKYSIGLDIGTNSVGWAVITDEYKVPSKKFKVLGNTDRHSIKKNLIGALLFDSGETAEATRLKRTARRRYTRRKNRICYLQEIFSNEMAKVDDSFFHRLEESFLVEEDKKHERHPIFGNIVDEVAYHEKYPTIYHLRKKLVDSTDKADLRLIYLALAHMIKFRGHFLIEGDLNPDNSDVDKLFIQLVQTYNQLFEENPINASGVDAKAILSARLSKSRRLENLIAQLPGEKKNGLFGNLIALSLGLTPNFKSNFDLAEDAKLQLSKDTYDDDLDNLLAQIGDQYADLFLAAKNLSDAILLSDILRVNTEITKAPLSASMIKRYDEHHQDLTLLKALVRQQLPEKYKEIFFDQSKNGYAGYIDGGASQEEFYKFIKPILEKMDGTEELLVKLNREDLLRKQRTFDNGSIPHQIHLGELHAILRRQEDFYPFLKDNREKIEKILTFRIPYYVGPLARGNSRFAWMTRKSEETITPWNFEEVVDKGASAQSFIERMTNFDKNLPNEKVLPKHSLLYEYFTVYNELTKVKYVTEGMRKPAFLSGEQKKAIVDLLFKTNRKVTVKQLKEDYFKKIECFDSVEISGVEDRFNASLGTYHDLLKIIKDKDFLDNEENEDILEDIVLTLTLFEDREMIEERLKTYAHLFDDKVMKQLKRRRYTGWGRLSRKLINGIRDKQSGKTILDFLKSDGFANRNFMQLIHDDSLTFKEDIQKAQVSGQGDSLHEHIANLAGSPAIKKGILQTVKVVDELVKVMGRHKPENIVIEMARENQTTQKGQKNSRERMKRIEEGIKELGSQILKEHPVENTQLQNEKLYLYYLQNGRDMYVDQELDINRLSDYDVDHIVPQSFLKDDSIDNKVLTRSDKARGKSDNVPSEEVVKKMKNYWRQLLNAKLITQRKFDNLTKAERGGLSELDKAGFIKRQLVETRQITKHVAQILDSRMNTKYDENDKLIREVKVITLKSKLVSDFRKDFQFYKVREINNYHHAHDAYLNAVVGTALIKKYPKLESEFVYGDYKVYDVRKMIAKSEQEIGKATAKYFFYSNIMNFFKTEITLANGEIRKRPLIETNGETGEIVWDKGRDFATVRKVLSMPQVNIVKKTEVQTGGFSKESILPKRNSDKLIARKKDWDPKKYGGFDSPTVAYSVLVVAKVEKGKSKKLKSVKELLGITIMERSSFEKNPIDFLEAKGYKEVKKDLIIKLPKYSLFELENGRKRMLASAGELQKGNELALPSKYVNFLYLASHYEKLKGSPEDNEQKQLFVEQHKHYLDEIIEQISEFSKRVILADANLDKVLSAYNKHRDKPIREQAENIIHLFTLTNLGAPAAFKYFDTTIDRKRYTSTKEVLDATLIHQSITGLYETRIDLSQLGGDGGEAAAKGGGPAPGGTAPLEEEYRLFLEAPIQNVTLLEQWKREIPKVWAEINPPGLASTQAPIHVQLLSTALPVRVRQYPITLEAKRSLRETIRKFRAAGILRPVHSPWNTPLLPVRKSGTSEYRMVQDLREVNKRVETIHPTVPNPYTLLSLLPPDRIWYSVLDLKDAFFCIPLAPESQLIFAFEWADAEEGESGQLTWTRLPQGFKNSPTLFDEALNRDLQGFRLDHPSVSLLQYVDDLLIAADTQAACLSATRDLLMTLAELGYRVSGKKAQLCQEEVTYLGFKIHKGSRSLSNSRTQAILQIPVPKTKRQVREFLGTIGYCRLWIPGFAELAQPLYAATRGGNDPLVWGEKEEEAFQSLKLALTQPPALALPSLDKPFQLFVEETSGAAKGVLTQALGPWKRPVAYLSKRLDPVAAGWPRCLRAIAAAALLTREASKLTFGQDIEITSSHNLESLLRSPPDKWLTNARITQYQVLLLDPPRVRFKQTAALNPATLLPETDDTLPIHHCLDTLDSLTSTRPDLTDQPLAQAEATLFTDGSSYIRDGKRYAGAAVVTLDSVIWAEPLPIGTSAQKAELIALTKALEWSKDKSVNIYTDSRYAFATLHVHGMIYRERGLLTAGGKAIKNAPEILALLTAVWLPKRVAVMHCKGHQKDDAPTSTGNRRADEVAREVAIRPLSTQATISAGKRTADGSEFEKRTADGSEFESPKKKAKVE

SEQ ID NO: 7487 - protein, 2098 aa, synthetic construct
MPAAKRVKLDGGDKKYSIGLDIGTNSVGWAVITDEYKVPSKKFKVLGNTDRHSIKKNLIGALLFDSGETAEATRLKRTARRRYTRRKNRICYLQEIFSNEMAKVDDSFFHRLEESFLVEEDKKHERHPIFGNIVDEVAYHEKYPTIYHLRKKLVDSTDKADLRLIYLALAHMIKFRGHFLIEGDLNPDNSDVDKLFIQLVQTYNQLFEENPINASGVDAKAILSARLSKSRRLENLIAQLPGEKKNGLFGNLIALSLGLTPNFKSNFDLAEDAKLQLSKDTYDDDLDNLLAQIGDQYADLFLAAKNLSDAILLSDILRVNTEITKAPLSASMIKRYDEHHQDLTLLKALVRQQLPEKYKEIFFDQSKNGYAGYIDGGASQEEFYKFIKPILEKMDGTEELLVKLNREDLLRKQRTFDNGSIPHQIHLGELHAILRRQEDFYPFLKDNREKIEKILTFRIPYYVGPLARGNSRFAWMTRKSEETITPWNFEEVVDKGASAQSFIERMTNFDKNLPNEKVLPKHSLLYEYFTVYNELTKVKYVTEGMRKPAFLSGEQKKAIVDLLFKTNRKVTVKQLKEDYFKKIECFDSVEISGVEDRFNASLGTYHDLLKIIKDKDFLDNEENEDILEDIVLTLTLFEDREMIEERLKTYAHLFDDKVMKQLKRRRYTGWGRLSRKLINGIRDKQSGKTILDFLKSDGFANRNFMQLIHDDSLTFKEDIQKAQVSGQGDSLHEHIANLAGSPAIKKGILQTVKVVDELVKVMGRHKPENIVIEMARENQTTQKGQKNSRERMKRIEEGIKELGSQILKEHPVENTQLQNEKLYLYYLQNGRDMYVDQELDINRLSDYDVDHIVPQSFLKDDSIDNKVLTRSDKARGKSDNVPSEEVVKKMKNYWRQLLNAKLITQRKFDNLTKAERGGLSELDKAGFIKRQLVETRQITKHVAQILDSRMNTKYDENDKLIREVKVITLKSKLVSDFRKDFQFYKVREINNYHHAHDAYLNAVVGTALIKKYPKLESEFVYGDYKVYDVRKMIAKSEQEIGKATAKYFFYSNIMNFFKTEITLANGEIRKRPLIETNGETGEIVWDKGRDFATVRKVLSMPQVNIVKKTEVQTGGFSKESILPKRNSDKLIARKKDWDPKKYGGFDSPTVAYSVLVVAKVEKGKSKKLKSVKELLGITIMERSSFEKNPIDFLEAKGYKEVKKDLIIKLPKYSLFELENGRKRMLASAGELQKGNELALPSKYVNFLYLASHYEKLKGSPEDNEQKQLFVEQHKHYLDEIIEQISEFSKRVILADANLDKVLSAYNKHRDKPIREQAENIIHLFTLTNLGAPAAFKYFDTTIDRKRYTSTKEVLDATLIHQSITGLYETRIDLSQLGGDGGEAAAKGGGPAPGGTAPLEEEYRLFLEAPIQNVTLLEQWKREIPKVWAEINPPGLASTQAPIHVQLLSTALPVRVRQYPITLEAKRSLRETIRKFRAAGILRPVHSPWNTPLLPVRKSGTSEYRMVQDLREVNKRVETIHPTVPNPYTLLSLLPPDRIWYSVLDLKDAFFCIPLAPESQLIFAFEWADAEEGESGQLTWTRLPQGFKNSPTLFNEALNRDLQGFRLDHPSVSLLQYVDDLLIAADTQAACLSATRDLLMTLAELGYRVSGKKAQLCQEEVTYLGFKIHKGSRSLSNSRTQAILQIPVPKTKRQVREFLGTIGYCRLWIPGFAELAQPLYAATRPGNDPLVWGEKEEEAFQSLKLALTQPPALALPSLDKPFQLFVEETSGAAKGVLTQALGPWKRPVAYLSKRLDPVAAGWPRCLRAIAAAALLTREASKLTFGQDIEITSSHNLESLLRSPPDKWLTNARITQYQVLLLDPPRVRFKQTAALNPATLLPETDDTLPIHHCLDTLDSLTSTRPDLTDQPLAQAEATLFTDGSSYIRDGKRYAGAAVVTLDSVIWAEPLPIGTSAQKAELIALTKALEWSKDKSVNIYTDSRYAFATLHVHGMIYRERGWLTAGGKAIKNAPEILALLTAVWLPKRVAVMHCKGHQKDDAPTSTGNRRADEVAREVAIRPLSTQATISAGKRTADGSEFEKRTADGSEFESPKKKAKVE

SEQ ID NO: 7488 - protein, 2098 aa, synthetic construct
MPAAKRVKLDGGDKKYSIGLDIGTNSVGWAVITDEYKVPSKKFKVLGNTDRHSIKKNLIGALLFDSGETAEATRLKRTARRRYTRRKNRICYLQEIFSNEMAKVDDSFFHRLEESFLVEEDKKHERHPIFGNIVDEVAYHEKYPTIYHLRKKLVDSTDKADLRLIYLALAHMIKFRGHFLIEGDLNPDNSDVDKLFIQLVQTYNQLFEENPINASGVDAKAILSARLSKSRRLENLIAQLPGEKKNGLFGNLIALSLGLTPNFKSNFDLAEDAKLQLSKDTYDDDLDNLLAQIGDQYADLFLAAKNLSDAILLSDILRVNTEITKAPLSASMIKRYDEHHQDLTLLKALVRQQLPEKYKEIFFDQSKNGYAGYIDGGASQEEFYKFIKPILEKMDGTEELLVKLNREDLLRKQRTFDNGSIPHQIHLGELHAILRRQEDFYPFLKDNREKIEKILTFRIPYYVGPLARGNSRFAWMTRKSEETITPWNFEEVVDKGASAQSFIERMTNFDKNLPNEKVLPKHSLLYEYFTVYNELTKVKYVTEGMRKPAFLSGEQKKAIVDLLFKTNRKVTVKQLKEDYFKKIECFDSVEISGVEDRFNASLGTYHDLLKIIKDKDFLDNEENEDILEDIVLTLTLFEDREMIEERLKTYAHLFDDKVMKQLKRRRYTGWGRLSRKLINGIRDKQSGKTILDFLKSDGFANRNFMQLIHDDSLTFKEDIQKAQVSGQGDSLHEHIANLAGSPAIKKGILQTVKVVDELVKVMGRHKPENIVIEMARENQTTQKGQKNSRERMKRIEEGIKELGSQILKEHPVENTQLQNEKLYLYYLQNGRDMYVDQELDINRLSDYDVDHIVPQSFLKDDSIDNKVLTRSDKARGKSDNVPSEEVVKKMKNYWRQLLNAKLITQRKFDNLTKAERGGLSELDKAGFIKRQLVETRQITKHVAQILDSRMNTKYDENDKLIREVKVITLKSKLVSDFRKDFQFYKVREINNYHHAHDAYLNAVVGTALIKKYPKLESEFVYGDYKVYDVRKMIAKSEQEIGKATAKYFFYSNIMNFFKTEITLANGEIRKRPLIETNGETGEIVWDKGRDFATVRKVLSMPQVNIVKKTEVQTGGFSKESILPKRNSDKLIARKKDWDPKKYGGFDSPTVAYSVLVVAKVEKGKSKKLKSVKELLGITIMERSSFEKNPIDFLEAKGYKEVKKDLIIKLPKYSLFELENGRKRMLASAGELQKGNELALPSKYVNFLYLASHYEKLKGSPEDNEQKQLFVEQHKHYLDEIIEQISEFSKRVILADANLDKVLSAYNKHRDKPIREQAENIIHLFTLTNLGAPAAFKYFDTTIDRKRYTSTKEVLDATLIHQSITGLYETRIDLSQLGGDGGEAAAKGGGPAPGGTAPLEEEYRLFLEAPIQNVTLLEQWKREIPKVWAEINPPGLASTQAPIHVQLLSTALPVRVRQYPITLEAKRSLRETIRKFRAAGILRPVHSPWNTPLLPVRKSGTSEYRMVQDLREVNKRVETIHPTVPNPYTLLSLLPPDRIWYSVLDLKDAFFCIPLAPESQLIFAFEWADAEEGESGQLTWTRLPQGFKNSPTLFNEALNRDLQGFRLDHPSVSLLQYVDDLLIAADTQAACLSATRDLLMTLAELGYRVSGKKAQLCQEEVTYLGFKIHKGSRSLSNSRTQAILQIPVPKTKRQVREFLGKIGYCRLFIPGFAELAQPLYAATRPGNDPLVWGEKEEEAFQSLKLALTQPPALALPSLDKPFQLFVEETSGAAKGVLTQALGPWKRPVAYLSKRLDPVAAGWPRCLRAIAAAALLTREASKLTFGQDIEITSSHNLESLLRSPPDKWLTNARITQYQVLLLDPPRVRFKQTAALNPATLLPETDDTLPIHHCLDTLDSLTSTRPDLTDQPLAQAEATLFTDGSSYIRDGKRYAGAAVVTLDSVIWAEPLPIGTSAQKAELIALTKALEWSKDKSVNIYTDSRYAFATLHVHGMIYRERGWLTAGGKAIKNAPEILALLTAVWLPKRVAVMHCKGHQKDDAPTSTGNRRADEVAREVAIRPLSTQATISAGKRTADGSEFEKRTADGSEFESPKKKAKVE

SEQ ID NO: 7489 - protein, 2102 aa, synthetic construct
MPAAKRVKLDGGDKKYSIGLDIGTNSVGWAVITDEYKVPSKKFKVLGNTDRHSIKKNLIGALLFDSGETAEATRLKRTARRRYTRRKNRICYLQEIFSNEMAKVDDSFFHRLEESFLVEEDKKHERHPIFGNIVDEVAYHEKYPTIYHLRKKLVDSTDKADLRLIYLALAHMIKFRGHFLIEGDLNPDNSDVDKLFIQLVQTYNQLFEENPINASGVDAKAILSARLSKSRRLENLIAQLPGEKKNGLFGNLIALSLGLTPNFKSNFDLAEDAKLQLSKDTYDDDLDNLLAQIGDQYADLFLAAKNLSDAILLSDILRVNTEITKAPLSASMIKRYDEHHQDLTLLKALVRQQLPEKYKEIFFDQSKNGYAGYIDGGASQEEFYKFIKPILEKMDGTEELLVKLNREDLLRKQRTFDNGSIPHQIHLGELHAILRRQEDFYPFLKDNREKIEKILTFRIPYYVGPLARGNSRFAWMTRKSEETITPWNFEEVVDKGASAQSFIERMTNFDKNLPNEKVLPKHSLLYEYFTVYNELTKVKYVTEGMRKPAFLSGEQKKAIVDLLFKTNRKVTVKQLKEDYFKKIECFDSVEISGVEDRFNASLGTYHDLLKIIKDKDFLDNEENEDILEDIVLTLTLFEDREMIEERLKTYAHLFDDKVMKQLKRRRYTGWGRLSRKLINGIRDKQSGKTILDFLKSDGFANRNFMQLIHDDSLTFKEDIQKAQVSGQGDSLHEHIANLAGSPAIKKGILQTVKVVDELVKVMGRHKPENIVIEMARENQTTQKGQKNSRERMKRIEEGIKELGSQILKEHPVENTQLQNEKLYLYYLQNGRDMYVDQELDINRLSDYDVDHIVPQSFLKDDSIDNKVLTRSDKARGKSDNVPSEEVVKKMKNYWRQLLNAKLITQRKFDNLTKAERGGLSELDKAGFIKRQLVETRQITKHVAQILDSRMNTKYDENDKLIREVKVITLKSKLVSDFRKDFQFYKVREINNYHHAHDAYLNAVVGTALIKKYPKLESEFVYGDYKVYDVRKMIAKSEQEIGKATAKYFFYSNIMNFFKTEITLANGEIRKRPLIETNGETGEIVWDKGRDFATVRKVLSMPQVNIVKKTEVQTGGFSKESILPKRNSDKLIARKKDWDPKKYGGFDSPTVAYSVLVVAKVEKGKSKKLKSVKELLGITIMERSSFEKNPIDFLEAKGYKEVKKDLIIKLPKYSLFELENGRKRMLASAGELQKGNELALPSKYVNFLYLASHYEKLKGSPEDNEQKQLFVEQHKHYLDEIIEQISEFSKRVILADANLDKVLSAYNKHRDKPIREQAENIIHLFTLTNLGAPAAFKYFDTTIDRKRYTSTKEVLDATLIHQSITGLYETRIDLSQLGGDGGEAAAKGGGPAPGGTVSLQDEHRLFDIPVTTSLPDVWLQDFPQAWAETGGLGRAKCQAPIIIDLKPTAVPVSIKQYPMSLEAHMGIRQHIIKFLELGVLRPCRSPWNTPLLPVKKPGTQDYRPVQDLREINKRTVDIHPTVPNPYNLLSTLKPDYSWYTVLDLKDAFFCLPLAPQSQELFAFEWKDPERGISGQLTWTRLPQGFKNSPTLFDEALHRDLTDFRTQHPEVTLLQYVDDLLLAAPTKKACTQGTRHLLQELGEKGYRASAKKAQICQTKVTYLGYILSEGKRWLTPGRIETVARIPPPRNPREVREFLGTAGFCRLWIPGFAELAAPLYALTKESTPFTWQTEHQLAFEALKKALLSAPALGLPDTSKPFTLFLDERQGIAKGVLTQKLGPWKRPVAYLSKKLDPVAAGWPPCLRIMAATAMLVKDSAKLTLGQPLTVITPHTLEAIVRQPPDRWITNARLTHYQALLLDTDRVQFGPPVTLNPATLLPVPENQPSPHDCRQVLAETHGTREDLKDQELPDADHTWYTDGSSYLDSGTRRAGAAVVDGHNTIWAQSLPPGTSAQKAELIALTKALELSKGKKANIYTDSRYAFATAHTHGSIYERRGLLTSEGKEIKNKAEIIALLKALFLPQEVAIIHCPGHQKGQDPVAVGNRQADRVARQAAMAEVLTLATEPDNTSHITAGKRTADGSEFEKRTADGSEFESPKKKAKVE

SEQ ID NO: 7490 - protein, 2102 aa, synthetic construct
MPAAKRVKLDGGDKKYSIGLDIGTNSVGWAVITDEYKVPSKKFKVLGNTDRHSIKKNLIGALLFDSGETAEATRLKRTARRRYTRRKNRICYLQEIFSNEMAKVDDSFFHRLEESFLVEEDKKHERHPIFGNIVDEVAYHEKYPTIYHLRKKLVDSTDKADLRLIYLALAHMIKFRGHFLIEGDLNPDNSDVDKLFIQLVQTYNQLFEENPINASGVDAKAILSARLSKSRRLENLIAQLPGEKKNGLFGNLIALSLGLTPNFKSNFDLAEDAKLQLSKDTYDDDLDNLLAQIGDQYADLFLAAKNLSDAILLSDILRVNTEITKAPLSASMIKRYDEHHQDLTLLKALVRQQLPEKYKEIFFDQSKNGYAGYIDGGASQEEFYKFIKPILEKMDGTEELLVKLNREDLLRKQRTFDNGSIPHQIHLGELHAILRRQEDFYPFLKDNREKIEKILTFRIPYYVGPLARGNSRFAWMTRKSEETITPWNFEEVVDKGASAQSFIERMTNFDKNLPNEKVLPKHSLLYEYFTVYNELTKVKYVTEGMRKPAFLSGEQKKAIVDLLFKTNRKVTVKQLKEDYFKKIECFDSVEISGVEDRFNASLGTYHDLLKIIKDKDFLDNEENEDILEDIVLTLTLFEDREMIEERLKTYAHLFDDKVMKQLKRRRYTGWGRLSRKLINGIRDKQSGKTILDFLKSDGFANRNFMQLIHDDSLTFKEDIQKAQVSGQGDSLHEHIANLAGSPAIKKGILQTVKVVDELVKVMGRHKPENIVIEMARENQTTQKGQKNSRERMKRIEEGIKELGSQILKEHPVENTQLQNEKLYLYYLQNGRDMYVDQELDINRLSDYDVDHIVPQSFLKDDSIDNKVLTRSDKARGKSDNVPSEEVVKKMKNYWRQLLNAKLITQRKFDNLTKAERGGLSELDKAGFIKRQLVETRQITKHVAQILDSRMNTKYDENDKLIREVKVITLKSKLVSDFRKDFQFYKVREINNYHHAHDAYLNAVVGTALIKKYPKLESEFVYGDYKVYDVRKMIAKSEQEIGKATAKYFFYSNIMNFFKTEITLANGEIRKRPLIETNGETGEIVWDKGRDFATVRKVLSMPQVNIVKKTEVQTGGFSKESILPKRNSDKLIARKKDWDPKKYGGFDSPTVAYSVLVVAKVEKGKSKKLKSVKELLGITIMERSSFEKNPIDFLEAKGYKEVKKDLIIKLPKYSLFELENGRKRMLASAGELQKGNELALPSKYVNFLYLASHYEKLKGSPEDNEQKQLFVEQHKHYLDEIIEQISEFSKRVILADANLDKVLSAYNKHRDKPIREQAENIIHLFTLTNLGAPAAFKYFDTTIDRKRYTSTKEVLDATLIHQSITGLYETRIDLSQLGGDGGEAAAKGGGPAPGGTVSLQDEHRLFDIPVTTSLPDVWLQDFPQAWAETGGLGRAKCQAPIIIDLKPTAVPVSIKQYPMSLEAHMGIRQHIIKFLELGVLRPCRSPWNTPLLPVKKPGTQDYRPVQDLREINKRTVDIHPTVPNPYNLLSTLKPDYSWYTVLDLKDAFFCLPLAPQSQELFAFEWKDPERGISGQLTWTRLPQGFKNSPTLFNEALHRDLTDFRTQHPEVTLLQYVDDLLLAAPTKKACTQGTRHLLQELGEKGYRASAKKAQICQTKVTYLGYILSEGKRWLTPGRIETVARIPPPRNPREVREFLGTAGFCRLWIPGFAELAAPLYALTKPSTPFTWQTEHQLAFEALKKALLSAPALGLPDTSKPFTLFLDERQGIAKGVLTQKLGPWKRPVAYLSKKLDPVAAGWPPCLRIMAATAMLVKDSAKLTLGQPLTVITPHTLEAIVRQPPDRWITNARLTHYQALLLDTDRVQFGPPVTLNPATLLPVPENQPSPHDCRQVLAETHGTREDLKDQELPDADHTWYTDGSSYLDSGTRRAGAAVVDGHNTIWAQSLPPGTSAQKAELIALTKALELSKGKKANIYTDSRYAFATAHTHGSIYERRGWLTSEGKEIKNKAEIIALLKALFLPQEVAIIHCPGHQKGQDPVAVGNRQADRVARQAAMAEVLTLATEPDNTSHITAGKRTADGSEFEKRTADGSEFESPKKKAKVE

SEQ ID NO: 7491 - protein, 2173 aa, synthetic construct
MPAAKRVKLDGGDKKYSIGLDIGTNSVGWAVITDEYKVPSKKFKVLGNTDRHSIKKNLIGALLFDSGETAEATRLKRTARRRYTRRKNRICYLQEIFSNEMAKVDDSFFHRLEESFLVEEDKKHERHPIFGNIVDEVAYHEKYPTIYHLRKKLVDSTDKADLRLIYLALAHMIKFRGHFLIEGDLNPDNSDVDKLFIQLVQTYNQLFEENPINASGVDAKAILSARLSKSRRLENLIAQLPGEKKNGLFGNLIALSLGLTPNFKSNFDLAEDAKLQLSKDTYDDDLDNLLAQIGDQYADLFLAAKNLSDAILLSDILRVNTEITKAPLSASMIKRYDEHHQDLTLLKALVRQQLPEKYKEIFFDQSKNGYAGYIDGGASQEEFYKFIKPILEKMDGTEELLVKLNREDLLRKQRTFDNGSIPHQIHLGELHAILRRQEDFYPFLKDNREKIEKILTFRIPYYVGPLARGNSRFAWMTRKSEETITPWNFEEVVDKGASAQSFIERMTNFDKNLPNEKVLPKHSLLYEYFTVYNELTKVKYVTEGMRKPAFLSGEQKKAIVDLLFKTNRKVTVKQLKEDYFKKIECFDSVEISGVEDRFNASLGTYHDLLKIIKDKDFLDNEENEDILEDIVLTLTLFEDREMIEERLKTYAHLFDDKVMKQLKRRRYTGWGRLSRKLINGIRDKQSGKTILDFLKSDGFANRNFMQLIHDDSLTFKEDIQKAQVSGQGDSLHEHIANLAGSPAIKKGILQTVKVVDELVKVMGRHKPENIVIEMARENQTTQKGQKNSRERMKRIEEGIKELGSQILKEHPVENTQLQNEKLYLYYLQNGRDMYVDQELDINRLSDYDVDHIVPQSFLKDDSIDNKVLTRSDKARGKSDNVPSEEVVKKMKNYWRQLLNAKLITQRKFDNLTKAERGGLSELDKAGFIKRQLVETRQITKHVAQILDSRMNTKYDENDKLIREVKVITLKSKLVSDFRKDFQFYKVREINNYHHAHDAYLNAVVGTALIKKYPKLESEFVYGDYKVYDVRKMIAKSEQEIGKATAKYFFYSNIMNFFKTEITLANGEIRKRPLIETNGETGEIVWDKGRDFATVRKVLSMPQVNIVKKTEVQTGGFSKESILPKRNSDKLIARKKDWDPKKYGGFDSPTVAYSVLVVAKVEKGKSKKLKSVKELLGITIMERSSFEKNPIDFLEAKGYKEVKKDLIIKLPKYSLFELENGRKRMLASAGELQKGNELALPSKYVNFLYLASHYEKLKGSPEDNEQKQLFVEQHKHYLDEIIEQISEFSKRVILADANLDKVLSAYNKHRDKPIREQAENIIHLFTLTNLGAPAAFKYFDTTIDRKRYTSTKEVLDATLIHQSITGLYETRIDLSQLGGDGGEAAAKGGGPAPGGMDLLKPLTVERKGVKIKGYWNSQADITCVPKDLLQGEEPVRQQNVTTIHGTQEGDVYYVNLKIDGRRINTEVIGTTLDYAIITPGDVPWILKKPLELTIKLDLEEQQGTLLNNSILSKKGKEELKQLFEKYSALWQSWENQVGHRRIRPHKIATGTVKPTPQKQYHINPKAKPDIQIVINDLLKQGVLIQKESTMNTPVYPVPKPNGRWRMVLDYRAVNKVTPLIAVQNQHSYGILGSLFKGRYKTTIDLSNGFWAHPIVPEDYWITAFTWQGKQYCWTVLPQGFLNSPGLFTGDVVDLLQGIPNVEVYVDDVYISHDSEKEHLEYLDILFNRLKEAGYIISLKKSNIANSIVDFLGFQITNEGRGLTDTFKEKLENITAPTTLKQLQSILGLLNFARNFIPDFTELIAPLYALIPKSTKNYVPWQIEHSTTLETLITKLNGAEYLQGRKGDKTLIMKVNASYTTGYIRYYNEGEKKPISYVSIVFSKTELKFTELEKLLTTVHKGLLKALDLSMGQNIHVYSPIVSMQNIQKTPQTAKKALASRWLSWLSYLEDPRIRFFYDPQMPALKDLPAVDTGKDNKKHPSNFQHIFYTDGSAITSPTKEGHLNAGMGIVYFINKDGNLQKQQEWSISLGNHTAQFAEIAAFEFALKKCLPLGGNILVVTDSNYVAKAYNEELDVWASNGFVNNRKKPLKHISKWKSVADLKRLRPDVVVTHEPGHQKLDSSPHAYGNNLADQLATQASFKVHAGKRTADGSEFEKRTADGSEFESPKKKAKVE

SEQ ID NO: 7492 - protein, 2094 aa, synthetic construct
MPAAKRVKLDGGDKKYSIGLDIGTNSVGWAVITDEYKVPSKKFKVLGNTDRHSIKKNLIGALLFDSGETAEATRLKRTARRRYTRRKNRICYLQEIFSNEMAKVDDSFFHRLEESFLVEEDKKHERHPIFGNIVDEVAYHEKYPTIYHLRKKLVDSTDKADLRLIYLALAHMIKFRGHFLIEGDLNPDNSDVDKLFIQLVQTYNQLFEENPINASGVDAKAILSARLSKSRRLENLIAQLPGEKKNGLFGNLIALSLGLTPNFKSNFDLAEDAKLQLSKDTYDDDLDNLLAQIGDQYADLFLAAKNLSDAILLSDILRVNTEITKAPLSASMIKRYDEHHQDLTLLKALVRQQLPEKYKEIFFDQSKNGYAGYIDGGASQEEFYKFIKPILEKMDGTEELLVKLNREDLLRKQRTFDNGSIPHQIHLGELHAILRRQEDFYPFLKDNREKIEKILTFRIPYYVGPLARGNSRFAWMTRKSEETITPWNFEEVVDKGASAQSFIERMTNFDKNLPNEKVLPKHSLLYEYFTVYNELTKVKYVTEGMRKPAFLSGEQKKAIVDLLFKTNRKVTVKQLKEDYFKKIECFDSVEISGVEDRFNASLGTYHDLLKIIKDKDFLDNEENEDILEDIVLTLTLFEDREMIEERLKTYAHLFDDKVMKQLKRRRYTGWGRLSRKLINGIRDKQSGKTILDFLKSDGFANRNFMQLIHDDSLTFKEDIQKAQVSGQGDSLHEHIANLAGSPAIKKGILQTVKVVDELVKVMGRHKPENIVIEMARENQTTQKGQKNSRERMKRIEEGIKELGSQILKEHPVENTQLQNEKLYLYYLQNGRDMYVDQELDINRLSDYDVDHIVPQSFLKDDSIDNKVLTRSDKARGKSDNVPSEEVVKKMKNYWRQLLNAKLITQRKFDNLTKAERGGLSELDKAGFIKRQLVETRQITKHVAQILDSRMNTKYDENDKLIREVKVITLKSKLVSDFRKDFQFYKVREINNYHHAHDAYLNAVVGTALIKKYPKLESEFVYGDYKVYDVRKMIAKSEQEIGKATAKYFFYSNIMNFFKTEITLANGEIRKRPLIETNGETGEIVWDKGRDFATVRKVLSMPQVNIVKKTEVQTGGFSKESILPKRNSDKLIARKKDWDPKKYGGFDSPTVAYSVLVVAKVEKGKSKKLKSVKELLGITIMERSSFEKNPIDFLEAKGYKEVKKDLIIKLPKYSLFELENGRKRMLASAGELQKGNELALPSKYVNFLYLASHYEKLKGSPEDNEQKQLFVEQHKHYLDEIIEQISEFSKRVILADANLDKVLSAYNKHRDKPIREQAENIIHLFTLTNLGAPAAFKYFDTTIDRKRYTSTKEVLDATLIHQSITGLYETRIDLSQLGGDGGEAAAKGGGPAPGGVLNLEEEYRLHEKPVPSSIDPSWLQLFPTVWAERAGMGLANQVPPVVVELRSGASPVAVRQYPMSKEAREGIRPHIQKFLDLGVLVPCRSPWNTPLLPVKKPGTNDYRPVQDLREINKRVQDIHPTVPNPYNLLSSLPPSYTWYSVLDLKDAFFCLRLHPNSQPLFAFEWKDPEKGNTGQLTWTRLPQGFKNSPTLFDEALHRDLAPFRALNPQVVLLQYVDDLLVAAPTYEDCKKGTQKLLQELSKLGYRVSAKKAQLCQREVTYLGYLLKEGKRWLTPARKATVMKIPVPTTPRQVREFLGTAGFCRLWIPGFASLAAPLYPLTKESIPFIWTEEHQQAFDHIKKALLSAPALALPDLTKPFTLYIDERAGVARGVLTQTLGPWRRPVAYLSKKLDPVASGWPTCLKAVAAVALLLKDADKLTLGQNVTVIASHSLESIVRQPPDRWMTNARMTHYQSLLLNERVSFAPPAVLNPATLLPVESEATPVHRCSEILAEETGTRRDLEDQPLPGVPTWYTDGSSFITEGKRRAGAPIVDGKRTVWASSLPEGTSAQKAELVALTQALRLAEGKNINIYTDSRYAFATAHIHGAIYKQRGLLTSAGKDIKNKEEILALLEAIHLPRRVAIIHCPGHQRGSNPVATGNRRADEAAKQAALSTRVLAGTTKPAGKRTADGSEFEKRTADGSEFESPKKKAKVE

SEQ ID NO: 7493 - protein, 2218 aa, synthetic construct
MPAAKRVKLDGGDKKYSIGLDIGTNSVGWAVITDEYKVPSKKFKVLGNTDRHSIKKNLIGALLFDSGETAEATRLKRTARRRYTRRKNRICYLQEIFSNEMAKVDDSFFHRLEESFLVEEDKKHERHPIFGNIVDEVAYHEKYPTIYHLRKKLVDSTDKADLRLIYLALAHMIKFRGHFLIEGDLNPDNSDVDKLFIQLVQTYNQLFEENPINASGVDAKAILSARLSKSRRLENLIAQLPGEKKNGLFGNLIALSLGLTPNFKSNFDLAEDAKLQLSKDTYDDDLDNLLAQIGDQYADLFLAAKNLSDAILLSDILRVNTEITKAPLSASMIKRYDEHHQDLTLLKALVRQQLPEKYKEIFFDQSKNGYAGYIDGGASQEEFYKFIKPILEKMDGTEELLVKLNREDLLRKQRTFDNGSIPHQIHLGELHAILRRQEDFYPFLKDNREKIEKILTFRIPYYVGPLARGNSRFAWMTRKSEETITPWNFEEVVDKGASAQSFIERMTNFDKNLPNEKVLPKHSLLYEYFTVYNELTKVKYVTEGMRKPAFLSGEQKKAIVDLLFKTNRKVTVKQLKEDYFKKIECFDSVEISGVEDRFNASLGTYHDLLKIIKDKDFLDNEENEDILEDIVLTLTLFEDREMIEERLKTYAHLFDDKVMKQLKRRRYTGWGRLSRKLINGIRDKQSGKTILDFLKSDGFANRNFMQLIHDDSLTFKEDIQKAQVSGQGDSLHEHIANLAGSPAIKKGILQTVKVVDELVKVMGRHKPENIVIEMARENQTTQKGQKNSRERMKRIEEGIKELGSQILKEHPVENTQLQNEKLYLYYLQNGRDMYVDQELDINRLSDYDVDHIVPQSFLKDDSIDNKVLTRSDKARGKSDNVPSEEVVKKMKNYWRQLLNAKLITQRKFDNLTKAERGGLSELDKAGFIKRQLVETRQITKHVAQILDSRMNTKYDENDKLIREVKVITLKSKLVSDFRKDFQFYKVREINNYHHAHDAYLNAVVGTALIKKYPKLESEFVYGDYKVYDVRKMIAKSEQEIGKATAKYFFYSNIMNFFKTEITLANGEIRKRPLIETNGETGEIVWDKGRDFATVRKVLSMPQVNIVKKTEVQTGGFSKESILPKRNSDKLIARKKDWDPKKYGGFDSPTVAYSVLVVAKVEKGKSKKLKSVKELLGITIMERSSFEKNPIDFLEAKGYKEVKKDLIIKLPKYSLFELENGRKRMLASAGELQKGNELALPSKYVNFLYLASHYEKLKGSPEDNEQKQLFVEQHKHYLDEIIEQISEFSKRVILADANLDKVLSAYNKHRDKPIREQAENIIHLFTLTNLGAPAAFKYFDTTIDRKRYTSTKEVLDATLIHQSITGLYETRIDLSQLGGDGGEAAAKGGGPAPGGTLGDQGSRGSDPLPEPRVTLTVEGIPTEFLVNTGAEHSVLTKPMGKMGSKRTVVAGATGSKVYPWTTKRLLKIGQKQVTHSFLVIPECPAPLLGRDLLTKLKAQIQFSTEGPQVTWEDRPAMCLVLNLEEEYRLHEKPVPPSIDPSWLQLFPMVWAEKAGMGLANQVPPVVVELKSDASPVAVRQYPMSKEAREGIRPHIQRFLDLGILVPCQSPWNTPLLPVKKPGTNDYRPVQDLREVNKRVQDIHPTVPNPYNLLSSLPPSHTWYSVLDLKDAFFCLKLHPNSQPLFAFEWRDPEKGNTGQLTWTRLPQGFKNSPTLFDEALHRDLASFRALNPQVVMLQYVDDLLVAAPTYRDCKEGTRRLLQELSKLGYRVSAKKAQLCREEVTYLGYLLKGGKRWLTPARKATVMKIPTPTTPRQVREFLGTAGFCRLWIPGFASLAAPLYPLTREKVPFTWTEAHQEAFGRIKEALLSAPALALPDLTKPFALYVDEKEGVARGVLTQTLGPWRRPVAYLSKKLDPVASGWPTCLKAIAAVALLLKDADKLTLGQNVLVIAPHNLESIVRQPPDRWMTNARMTHYQSLLLNERVSFAPPAILNPATLLPVESDDTPIHICSEILAEETGTRPDLRDQPLPGVPAWYTDGSSFIMDGRRQAGAAIVDNKRTVWASNLPEGTSAQKAELIALTQALRLAEGKSINIYTDSRYAFATAHVHGAIYKQRGLLTSAGKDIKNKEEILALLEAIHLPKRVAIIHCPGHQRGTDPVATGNRKADEAAKQAAQSTRILTETTKNAGKRTADGSEFEKRTADGSEFESPKKKAKVE

SEQ ID NO: 7494 - protein, 2127 aa, synthetic construct
MPAAKRVKLDGGDKKYSIGLDIGTNSVGWAVITDEYKVPSKKFKVLGNTDRHSIKKNLIGALLFDSGETAEATRLKRTARRRYTRRKNRICYLQEIFSNEMAKVDDSFFHRLEESFLVEEDKKHERHPIFGNIVDEVAYHEKYPTIYHLRKKLVDSTDKADLRLIYLALAHMIKFRGHFLIEGDLNPDNSDVDKLFIQLVQTYNQLFEENPINASGVDAKAILSARLSKSRRLENLIAQLPGEKKNGLFGNLIALSLGLTPNFKSNFDLAEDAKLQLSKDTYDDDLDNLLAQIGDQYADLFLAAKNLSDAILLSDILRVNTEITKAPLSASMIKRYDEHHQDLTLLKALVRQQLPEKYKEIFFDQSKNGYAGYIDGGASQEEFYKFIKPILEKMDGTEELLVKLNREDLLRKQRTFDNGSIPHQIHLGELHAILRRQEDFYPFLKDNREKIEKILTFRIPYYVGPLARGNSRFAWMTRKSEETITPWNFEEVVDKGASAQSFIERMTNFDKNLPNEKVLPKHSLLYEYFTVYNELTKVKYVTEGMRKPAFLSGEQKKAIVDLLFKTNRKVTVKQLKEDYFKKIECFDSVEISGVEDRFNASLGTYHDLLKIIKDKDFLDNEENEDILEDIVLTLTLFEDREMIEERLKTYAHLFDDKVMKQLKRRRYTGWGRLSRKLINGIRDKQSGKTILDFLKSDGFANRNFMQLIHDDSLTFKEDIQKAQVSGQGDSLHEHIANLAGSPAIKKGILQTVKVVDELVKVMGRHKPENIVIEMARENQTTQKGQKNSRERMKRIEEGIKELGSQILKEHPVENTQLQNEKLYLYYLQNGRDMYVDQELDINRLSDYDVDHIVPQSFLKDDSIDNKVLTRSDKARGKSDNVPSEEVVKKMKNYWRQLLNAKLITQRKFDNLTKAERGGLSELDKAGFIKRQLVETRQITKHVAQILDSRMNTKYDENDKLIREVKVITLKSKLVSDFRKDFQFYKVREINNYHHAHDAYLNAVVGTALIKKYPKLESEFVYGDYKVYDVRKMIAKSEQEIGKATAKYFFYSNIMNFFKTEITLANGEIRKRPLIETNGETGEIVWDKGRDFATVRKVLSMPQVNIVKKTEVQTGGFSKESILPKRNSDKLIARKKDWDPKKYGGFDSPTVAYSVLVVAKVEKGKSKKLKSVKELLGITIMERSSFEKNPIDFLEAKGYKEVKKDLIIKLPKYSLFELENGRKRMLASAGELQKGNELALPSKYVNFLYLASHYEKLKGSPEDNEQKQLFVEQHKHYLDEIIEQISEFSKRVILADANLDKVLSAYNKHRDKPIREQAENIIHLFTLTNLGAPAAFKYFDTTIDRKRYTSTKEVLDATLIHQSITGLYETRIDLSQLGGDGGEAAAKGGGPAPGGLLGRDLLTKLKAQIQFSTEGPQVTWEDRPAMCLVLNLEEEYRLHEKPVPPSIDPSWLQLFPMVWAEKAGMGLANQVPPVVVELKSDASPVAVRQYPMSKEAREGIRPHIQRFLDLGILVPCQSPWNTPLLPVKKPGTNDYRPVQDLREVNKRVQDIHPTVPNPYNLLSSLPPSHTWYSVLDLKDAFFCLKLHPNSQPLFAFEWRDPEKGNTGQLTWTRLPQGFKNSPTLFNEALHRDLASFRALNPQVVMLQYVDDLLVAAPTYRDCKEGTRRLLQELSKLGYRVSAKKAQLCREEVTYLGYLLKGGKRWLTPARKATVMKIPTPTTPRQVREFLGKAGFCRLFIPGFASLAAPLYPLTRPKVPFTWTEAHQEAFGRIKEALLSAPALALPDLTKPFALYVDEKEGVARGVLTQTLGPWRRPVAYLSKKLDPVASGWPTCLKAIAAVALLLKDADKLTLGQNVLVIAPHNLESIVRQPPDRWMTNARMTHYQSLLLNERVSFAPPAILNPATLLPVESDDTPIHICSEILAEETGTRPDLRDQPLPGVPAWYTDGSSFIMDGRRQAGAAIVDNKRTVWASNLPEGTSAQKAELIALTQALRLAEGKSINIYTDSRYAFATAHVHGAIYKQRGWLTSAGKDIKNKEEILALLEAIHLPKRVAIIHCPGHQRGTDPVATGNRKADEAAKQAAQSTRILTETTKNAGKRTADGSEFEKRTADGSEFESPKKKAKVE

SEQ ID NO: 7495 - protein, 2096 aa, synthetic construct
MPAAKRVKLDGGDKKYSIGLDIGTNSVGWAVITDEYKVPSKKFKVLGNTDRHSIKKNLIGALLFDSGETAEATRLKRTARRRYTRRKNRICYLQEIFSNEMAKVDDSFFHRLEESFLVEEDKKHERHPIFGNIVDEVAYHEKYPTIYHLRKKLVDSTDKADLRLIYLALAHMIKFRGHFLIEGDLNPDNSDVDKLFIQLVQTYNQLFEENPINASGVDAKAILSARLSKSRRLENLIAQLPGEKKNGLFGNLIALSLGLTPNFKSNFDLAEDAKLQLSKDTYDDDLDNLLAQIGDQYADLFLAAKNLSDAILLSDILRVNTEITKAPLSASMIKRYDEHHQDLTLLKALVRQQLPEKYKEIFFDQSKNGYAGYIDGGASQEEFYKFIKPILEKMDGTEELLVKLNREDLLRKQRTFDNGSIPHQIHLGELHAILRRQEDFYPFLKDNREKIEKILTFRIPYYVGPLARGNSRFAWMTRKSEETITPWNFEEVVDKGASAQSFIERMTNFDKNLPNEKVLPKHSLLYEYFTVYNELTKVKYVTEGMRKPAFLSGEQKKAIVDLLFKTNRKVTVKQLKEDYFKKIECFDSVEISGVEDRFNASLGTYHDLLKIIKDKDFLDNEENEDILEDIVLTLTLFEDREMIEERLKTYAHLFDDKVMKQLKRRRYTGWGRLSRKLINGIRDKQSGKTILDFLKSDGFANRNFMQLIHDDSLTFKEDIQKAQVSGQGDSLHEHIANLAGSPAIKKGILQTVKVVDELVKVMGRHKPENIVIEMARENQTTQKGQKNSRERMKRIEEGIKELGSQILKEHPVENTQLQNEKLYLYYLQNGRDMYVDQELDINRLSDYDVDHIVPQSFLKDDSIDNKVLTRSDKARGKSDNVPSEEVVKKMKNYWRQLLNAKLITQRKFDNLTKAERGGLSELDKAGFIKRQLVETRQITKHVAQILDSRMNTKYDENDKLIREVKVITLKSKLVSDFRKDFQFYKVREINNYHHAHDAYLNAVVGTALIKKYPKLESEFVYGDYKVYDVRKMIAKSEQEIGKATAKYFFYSNIMNFFKTEITLANGEIRKRPLIETNGETGEIVWDKGRDFATVRKVLSMPQVNIVKKTEVQTGGFSKESILPKRNSDKLIARKKDWDPKKYGGFDSPTVAYSVLVVAKVEKGKSKKLKSVKELLGITIMERSSFEKNPIDFLEAKGYKEVKKDLIIKLPKYSLFELENGRKRMLASAGELQKGNELALPSKYVNFLYLASHYEKLKGSPEDNEQKQLFVEQHKHYLDEIIEQISEFSKRVILADANLDKVLSAYNKHRDKPIREQAENIIHLFTLTNLGAPAAFKYFDTTIDRKRYTSTKEVLDATLIHQSITGLYETRIDLSQLGGDGGEAAAKGGGPAPGGTLGIEDEYRLHETSTEPDVSLGSTWLSDFPQAWAETGGMGLAVRQAPLIIPLKATSTPVSIQQYPMSHEARLGIKPHIQRLLDQGILVPCQSPWNTPLLPVKKPGTNDYRPVQDLREVNKRVEDIHPTVPNPYNLLSGLPPSHQWYTVLDLKDAFFCLRLHPTSQPLFAFEWRDPGMGISGQLTWTRLPQGFKNSPTLFNEALHRDLADFRIQHPDLILLQYVDDILLAATSELDCQQGTRALLQTLGDLGYRASAKKAQICQKQVKYLGYLLREGQRWLTEARKETVMGQPVPKTPRQLREFLGTAGFCRLWIPGFAEMAAPLYPLTKPGTLFSWGPDQQKAYQEIKQALLTAPALGLPDLTKPFELFVDEKQGYAKGVLTQKLGPWRRPVAYLSKKLDPVAAGWPPCLRMVAAIAVLTKDAGKLTMGQPLVILAPHAVEALVKQPPDRWLSNARMTHYQAMLLDTDRVQFGPVVALNPATLLPLPEEGAPHDCLEILAETHGTRPDLTDQPIPDADHTWYTDGSSFLQEGQRKAGAAVTTETEVIWAGALPAGTSAQRAELIALTQALKMAEGKRLNVYTDSRYAFATAHIHGEIYRRRGWLTSEGREIKNKSEILALLKALFLPKRLSIIHCLGHQKGDSAEARGNRLADQAAREAAIKTPPDTSTLLAGKRTADGSEFEKRTADGSEFESPKKKAKVE

SEQ ID NO: 7496 - protein, 2096 aa, synthetic construct; identical to SEQ ID NO: 4535

SEQ ID NO: 7497 - protein, 2096 aa, synthetic construct; identical to SEQ ID NO: 4535

SEQ ID NO: 7498 - protein, 2176 aa, synthetic construct
MPAAKRVKLDGGDKKYSIGLDIGTNSVGWAVITDEYKVPSKKFKVLGNTDRHSIKKNLIGALLFDSGETAEATRLKRTARRRYTRRKNRICYLQEIFSNEMAKVDDSFFHRLEESFLVEEDKKHERHPIFGNIVDEVAYHEKYPTIYHLRKKLVDSTDKADLRLIYLALAHMIKFRGHFLIEGDLNPDNSDVDKLFIQLVQTYNQLFEENPINASGVDAKAILSARLSKSRRLENLIAQLPGEKKNGLFGNLIALSLGLTPNFKSNFDLAEDAKLQLSKDTYDDDLDNLLAQIGDQYADLFLAAKNLSDAILLSDILRVNTEITKAPLSASMIKRYDEHHQDLTLLKALVRQQLPEKYKEIFFDQSKNGYAGYIDGGASQEEFYKFIKPILEKMDGTEELLVKLNREDLLRKQRTFDNGSIPHQIHLGELHAILRRQEDFYPFLKDNREKIEKILTFRIPYYVGPLARGNSRFAWMTRKSEETITPWNFEEVVDKGASAQSFIERMTNFDKNLPNEKVLPKHSLLYEYFTVYNELTKVKYVTEGMRKPAFLSGEQKKAIVDLLFKTNRKVTVKQLKEDYFKKIECFDSVEISGVEDRFNASLGTYHDLLKIIKDKDFLDNEENEDILEDIVLTLTLFEDREMIEERLKTYAHLFDDKVMKQLKRRRYTGWGRLSRKLINGIRDKQSGKTILDFLKSDGFANRNFMQLIHDDSLTFKEDIQKAQVSGQGDSLHEHIANLAGSPAIKKGILQTVKVVDELVKVMGRHKPENIVIEMARENQTTQKGQKNSRERMKRIEEGIKELGSQILKEHPVENTQLQNEKLYLYYLQNGRDMYVDQELDINRLSDYDVDHIVPQSFLKDDSIDNKVLTRSDKARGKSDNVPSEEVVKKMKNYWRQLLNAKLITQRKFDNLTKAERGGLSELDKAGFIKRQLVETRQITKHVAQILDSRMNTKYDENDKLIREVKVITLKSKLVSDFRKDFQFYKVREINNYHHAHDAYLNAVVGTALIKKYPKLESEFVYGDYKVYDVRKMIAKSEQEIGKATAKYFFYSNIMNFFKTEITLANGEIRKRPLIETNGETGEIVWDKGRDFATVRKVLSMPQVNIVKKTEVQTGGFSKESILPKRNSDKLIARKKDWDPKKYGGFDSPTVAYSVLVVAKVEKGKSKKLKSVKELLGITIMERSSFEKNPIDFLEAKGYKEVKKDLIIKLPKYSLFELENGRKRMLASAGELQKGNELALPSKYVNFLYLASHYEKLKGSPEDNEQKQLFVEQHKHYLDEIIEQISEFSKRVILADANLDKVLSAYNKHRDKPIREQAENIIHLFTLTNLGAPAAFKYFDTTIDRKRYTSTKEVLDATLIHQSITGLYETRIDLSQLGGDGGEAAAKGGGPAPGGMNPLQLLQPLPAEVKGTKLLAHWNSGATITCIPESFLEDEQPIKQTLIKTIHGEKQQNVYYLTFKVKGRKVEAEVIASPYEYILLSPTDVPWLTQQPLQLTILVPLQEYQDRILNKTALPEEQKQQLKALFTKYDNLWQHWENQVGHRKIRPHNIATGDYPPRPQKQYPINPKAKPSIQIVIDDLLKQGVLTPQNSTMNTPVYPVPKPDGRWRMVLDYREVNKTIPLTAAQNQHSAGILATIVRQKYKTTLDLANGFWAHPITPDSYWLTAFTWQGKQYCWTRLPQGFLNSPALFTADAVDLLKEVPNVQVYVDDIYLSHDNPHEHIQQLEKVFQILLQAGYVVSLKKSEIGQRTVEFLGFNITKEGRGLTDTFKTKLLNVTPPKDLKQLQSILGLLNFARNFIPNFAELVQTLYNLIASSKGKYIEWTEDNTKQLNKVIEALNTASNLEERLPDQRLVIKVNTSPSAGYVRYYNESGKKPIMYLNYVFSKAELKFSMLEKLLTTMHKALIKAMDLAMGQEILVYSPIVSMTKIQKTPLPERKALPIRWITWMTYLEDPRIQFHYDKTLPELKHIPDVYTSSIPPLKHPSQYEGVFCTDGSAIKSPDPTKSNNAGMGIVHAIYNPEYKILNQWSIPLGHHTAQMAEIAAVEFACKKALKVPGPVLVITDSFYVAESANKELPYWKSNGFVNNKKEPLKHISKWKSIAECLSIKPDITIQHEKGHQPINTSIHTEGNALADKLATQGSYVVNAGKRTADGSEFEKRTADGSEFESPKKKAKVE

SEQ ID NO: 7499 - protein, 2094 aa, synthetic construct
MPAAKRVKLDGGDKKYSIGLDIGTNSVGWAVITDEYKVPSKKFKVLGNTDRHSIKKNLIGALLFDSGETAEATRLKRTARRRYTRRKNRICYLQEIFSNEMAKVDDSFFHRLEESFLVEEDKKHERHPIFGNIVDEVAYHEKYPTIYHLRKKLVDSTDKADLRLIYLALAHMIKFRGHFLIEGDLNPDNSDVDKLFIQLVQTYNQLFEENPINASGVDAKAILSARLSKSRRLENLIAQLPGEKKNGLFGNLIALSLGLTPNFKSNFDLAEDAKLQLSKDTYDDDLDNLLAQIGDQYADLFLAAKNLSDAILLSDILRVNTEITKAPLSASMIKRYDEHHQDLTLLKALVRQQLPEKYKEIFFDQSKNGYAGYIDGGASQEEFYKFIKPILEKMDGTEELLVKLNREDLLRKQRTFDNGSIPHQIHLGELHAILRRQEDFYPFLKDNREKIEKILTFRIPYYVGPLARGNSRFAWMTRKSEETITPWNFEEVVDKGASAQSFIERMTNFDKNLPNEKVLPKHSLLYEYFTVYNELTKVKYVTEGMRKPAFLSGEQKKAIVDLLFKTNRKVTVKQLKEDYFKKIECFDSVEISGVEDRFNASLGTYHDLLKIIKDKDFLDNEENEDILEDIVLTLTLFEDREMIEERLKTYAHLFDDKVMKQLKRRRYTGWGRLSRKLINGIRDKQSGKTILDFLKSDGFANRNFMQLIHDDSLTFKEDIQKAQVSGQGDSLHEHIANLAGSPAIKKGILQTVKVVDELVKVMGRHKPENIVIEMARENQTTQKGQKNSRERMKRIEEGIKELGSQILKEHPVENTQLQNEKLYLYYLQNGRDMYVDQELDINRLSDYDVDHIVPQSFLKDDSIDNKVLTRSDKARGKSDNVPSEEVVKKMKNYWRQLLNAKLITQRKFDNLTKAERGGLSELDKAGFIKRQLVETRQITKHVAQILDSRMNTKYDENDKLIREVKVITLKSKLVSDFRKDFQFYKVREINNYHHAHDAYLNAVVGTALIKKYPKLESEFVYGDYKVYDVRKMIAKSEQEIGKATAKYFFYSNIMNFFKTEITLANGEIRKRPLIETNGETGEIVWDKGRDFATVRKVLSMPQVNIVKKTEVQTGGFSKESILPKRNSDKLIARKKDWDPKKYGGFDSPTVAYSVLVVAKVEKGKSKKLKSVKELLGITIMERSSFEKNPIDFLEAKGYKEVKKDLIIKLPKYSLFELENGRKRMLASAGELQKGNELALPSKYVNFLYLASHYEKLKGSPEDNEQKQLFVEQHKHYLDEIIEQISEFSKRVILADANLDKVLSAYNKHRDKPIREQAENIIHLFTLTNLGAPAAFKYFDTTIDRKRYTSTKEVLDATLIHQSITGLYETRIDLSQLGGDGGEAAAKGGGPAPGGVLNLEEEYRLHEKPVPSSIDPSWLQLFPTVWAERAGMGLANQVPPVVVELRSGASPVAVRQYPMSKEAREGIRPHIQRFLDLGVLVPCQSPWNTPLLPVKKPGTNDYRPVQDLREINKRVQDIHPTVPNPYNLLSSLPPSHTWYSVLDLKDAFFCLKLHPNSQPLFAFEWRDPEKGNTGQLTWTRLPQGFKNSPTLFNEALHRDLAPFRALNPQVVLLQYVDDLLVAAPTYRDCKEGTQKLLQELSKLGYRVSAKKAQLCQKEVTYLGYLLKEGKRWLTPARKATVMKIPPPTTPRQVREFLGKAGFCRLFIPGFASLAAPLYPLTKPSIPFIWTEEHQKAFDRIKEALLSAPALALPDLTKPFTLYVDERAGVARGVLTQTLGPWRRPVAYLSKKLDPVASGWPTCLKAVAAVALLLKDADKLTLGQNVTVIASHSLESIVRQPPDRWMTNARMTHYQSLLLNERVSFAPPAVLNPATLLPVESEATPVHRCSEILAEETGTRRDLKDQPLPGVPAWYTDGSSFIAEGKRRAGAAIVDGKRTVWASSLPEGTSAQKAELVALTQALRLAEGKDINIYTDSRYAFATAHIHGAIYKQRGWLTSAGKDIKNKEEILALLEAIHLPKRVAIIHCPGHQKGNDPVATGNRRADEAAKQAALSTRVLAETTKPAGKRTADGSEFEKRTADGSEFESPKKKAKVE

SEQ ID NO: 7500 - protein, 2098 aa, synthetic construct
MPAAKRVKLDGGDKKYSIGLDIGTNSVGWAVITDEYKVPSKKFKVLGNTDRHSIKKNLIGALLFDSGETAEATRLKRTARRRYTRRKNRICYLQEIFSNEMAKVDDSFFHRLEESFLVEEDKKHERHPIFGNIVDEVAYHEKYPTIYHLRKKLVDSTDKADLRLIYLALAHMIKFRGHFLIEGDLNPDNSDVDKLFIQLVQTYNQLFEENPINASGVDAKAILSARLSKSRRLENLIAQLPGEKKNGLFGNLIALSLGLTPNFKSNFDLAEDAKLQLSKDTYDDDLDNLLAQIGDQYADLFLAAKNLSDAILLSDILRVNTEITKAPLSASMIKRYDEHHQDLTLLKALVRQQLPEKYKEIFFDQSKNGYAGYIDGGASQEEFYKFIKPILEKMDGTEELLVKLNREDLLRKQRTFDNGSIPHQIHLGELHAILRRQEDFYPFLKDNREKIEKILTFRIPYYVGPLARGNSRFAWMTRKSEETITPWNFEEVVDKGASAQSFIERMTNFDKNLPNEKVLPKHSLLYEYFTVYNELTKVKYVTEGMRKPAFLSGEQKKAIVDLLFKTNRKVTVKQLKEDYFKKIECFDSVEISGVEDRFNASLGTYHDLLKIIKDKDFLDNEENEDILEDIVLTLTLFEDREMIEERLKTYAHLFDDKVMKQLKRRRYTGWGRLSRKLINGIRDKQSGKTILDFLKSDGFANRNFMQLIHDDSLTFKEDIQKAQVSGQGDSLHEHIANLAGSPAIKKGILQTVKVVDELVKVMGRHKPENIVIEMARENQTTQKGQKNSRERMKRIEEGIKELGSQILKEHPVENTQLQNEKLYLYYLQNGRDMYVDQELDINRLSDYDVDHIVPQSFLKDDSIDNKVLTRSDKARGKSDNVPSEEVVKKMKNYWRQLLNAKLITQRKFDNLTKAERGGLSELDKAGFIKRQLVETRQITKHVAQILDSRMNTKYDENDKLIREVKVITLKSKLVSDFRKDFQFYKVREINNYHHAHDAYLNAVVGTALIKKYPKLESEFVYGDYKVYDVRKMIAKSEQEIGKATAKYFFYSNIMNFFKTEITLANGEIRKRPLIETNGETGEIVWDKGRDFATVRKVLSMPQVNIVKKTEVQTGGFSKESILPKRNSDKLIARKKDWDPKKYGGFDSPTVAYSVLVVAKVEKGKSKKLKSVKELLGITIMERSSFEKNPIDFLEAKGYKEVKKDLIIKLPKYSLFELENGRKRMLASAGELQKGNELALPSKYVNFLYLASHYEKLKGSPEDNEQKQLFVEQHKHYLDEIIEQISEFSKRVILADANLDKVLSAYNKHRDKPIREQAENIIHLFTLTNLGAPAAFKYFDTTIDRKRYTSTKEVLDATLIHQSITGLYETRIDLSQLGGDGGEAAAKPAPGGGGGTAPLEEEYRLFLEAPIQNVTLLEQWKREIPKVWAEINPPGLASTQAPIHVQLLSTALPVRVRQYPITLEAKRSLRETIRKFRAAGILRPVHSPWNTPLLPVRKSGTSEYRMVQDLREVNKRVETIHPTVPNPYTLLSLLPPDRIWYSVLDLKDAFFCIPLAPESQLIFAFEWADAEEGESGQLTWTRLPQGFKNSPTLFNEALNRDLQGFRLDHPSVSLLQYVDDLLIAADTQAACLSATRDLLMTLAELGYRVSGKKAQLCQEEVTYLGFKIHKGSRSLSNSRTQAILQIPVPKTKRQVREFLGKIGYCRLFIPGFAELAQPLYAATRPGNDPLVWGEKEEEAFQSLKLALTQPPALALPSLDKPFQLFVEETSGAAKGVLTQALGPWKRPVAYLSKRLDPVAAGWPRCLRAIAAAALLTREASKLTFGQDIEITSSHNLESLLRSPPDKWLTNARITQYQVLLLDPPRVRFKQTAALNPATLLPETDDTLPIHHCLDTLDSLTSTRPDLTDQPLAQAEATLFTDGSSYIRDGKRYAGAAVVTLDSVIWAEPLPIGTSAQKAELIALTKALEWSKDKSVNIYTDSRYAFATLHVHGMIYRERGWLTAGGKAIKNAPEILALLTAVWLPKRVAVMHCKGHQKDDAPTSTGNRRADEVAREVAIRPLSTQATISAGKRTADGSEFEKRTADGSEFESPKKKAKVE

SEQ ID NO: 7501 - protein, 2102 aa, synthetic construct
MPAAKRVKLDGGDKKYSIGLDIGTNSVGWAVITDEYKVPSKKFKVLGNTDRHSIKKNLIGALLFDSGETAEATRLKRTARRRYTRRKNRICYLQEIFSNEMAKVDDSFFHRLEESFLVEEDKKHERHPIFGNIVDEVAYHEKYPTIYHLRKKLVDSTDKADLRLIYLALAHMIKFRGHFLIEGDLNPDNSDVDKLFIQLVQTYNQLFEENPINASGVDAKAILSARLSKSRRLENLIAQLPGEKKNGLFGNLIALSLGLTPNFKSNFDLAEDAKLQLSKDTYDDDLDNLLAQIGDQYADLFLAAKNLSDAILLSDILRVNTEITKAPLSASMIKRYDEHHQDLTLLKALVRQQLPEKYKEIFFDQSKNGYAGYIDGGASQEEFYKFIKPILEKMDGTEELLVKLNREDLLRKQRTFDNGSIPHQIHLGELHAILRRQEDFYPFLKDNREKIEKILTFRIPYYVGPLARGNSRFAWMTRKSEETITPWNFEEVVDKGASAQSFIERMTNFDKNLPNEKVLPKHSLLYEYFTVYNELTKVKYVTEGMRKPAFLSGEQKKAIVDLLFKTNRKVTVKQLKEDYFKKIECFDSVEISGVEDRFNASLGTYHDLLKIIKDKDFLDNEENEDILEDIVLTLTLFEDREMIEERLKTYAHLFDDKVMKQLKRRRYTGWGRLSRKLINGIRDKQSGKTILDFLKSDGFANRNFMQLIHDDSLTFKEDIQKAQVSGQGDSLHEHIANLAGSPAIKKGILQTVKVVDELVKVMGRHKPENIVIEMARENQTTQKGQKNSRERMKRIEEGIKELGSQILKEHPVENTQLQNEKLYLYYLQNGRDMYVDQELDINRLSDYDVDHIVPQSFLKDDSIDNKVLTRSDKARGKSDNVPSEEVVKKMKNYWRQLLNAKLITQRKFDNLTKAERGGLSELDKAGFIKRQLVETRQITKHVAQILDSRMNTKYDENDKLIREVKVITLKSKLVSDFRKDFQFYKVREINNYHHAHDAYLNAVVGTALIKKYPKLESEFVYGDYKVYDVRKMIAKSEQEIGKATAKYFFYSNIMNFFKTEITLANGEIRKRPLIETNGETGEIVWDKGRDFATVRKVLSMPQVNIVKKTEVQTGGFSKESILPKRNSDKLIARKKDWDPKKYGGFDSPTVAYSVLVVAKVEKGKSKKLKSVKELLGITIMERSSFEKNPIDFLEAKGYKEVKKDLIIKLPKYSLFELENGRKRMLASAGELQKGNELALPSKYVNFLYLASHYEKLKGSPEDNEQKQLFVEQHKHYLDEIIEQISEFSKRVILADANLDKVLSAYNKHRDKPIREQAENIIHLFTLTNLGAPAAFKYFDTTIDRKRYTSTKEVLDATLIHQSITGLYETRIDLSQLGGDGGEAAAKPAPGGGGGTVSLQDEHRLFDIPVTTSLPDVWLQDFPQAWAETGGLGRAKCQAPIIIDLKPTAVPVSIKQYPMSLEAHMGIRQHIIKFLELGVLRPCRSPWNTPLLPVKKPGTQDYRPVQDLREINKRTVDIHPTVPNPYNLLSTLKPDYSWYTVLDLKDAFFCLPLAPQSQELFAFEWKDPERGISGQLTWTRLPQGFKNSPTLFNEALHRDLTDFRTQHPEVTLLQYVDDLLLAAPTKKACTQGTRHLLQELGEKGYRASAKKAQICQTKVTYLGYILSEGKRWLTPGRIETVARIPPPRNPREVREFLGKAGFCRLFIPGFAELAAPLYALTKPSTPFTWQTEHQLAFEALKKALLSAPALGLPDTSKPFTLFLDERQGIAKGVLTQKLGPWKRPVAYLSKKLDPVAAGWPPCLRIMAATAMLVKDSAKLTLGQPLTVITPHTLEAIVRQPPDRWITNARLTHYQALLLDTDRVQFGPPVTLNPATLLPVPENQPSPHDCRQVLAETHGTREDLKDQELPDADHTWYTDGSSYLDSGTRRAGAAVVDGHNTIWAQSLPPGTSAQKAELIALTKALELSKGKKANIYTDSRYAFATAHTHGSIYERRGWLTSEGKEIKNKAEIIALLKALFLPQEVAIIHCPGHQKGQDPVAVGNRQADRVARQAAMAEVLTLATEPDNTSHITAGKRTADGSEFEKRTADGSEFESPKKKAKVE

SEQ ID NO: 7502 - protein, 2095 aa, synthetic construct
MPAAKRVKLDGGDKKYSIGLDIGTNSVGWAVITDEYKVPSKKFKVLGNTDRHSIKKNLIGALLFDSGETAEATRLKRTARRRYTRRKNRICYLQEIFSNEMAKVDDSFFHRLEESFLVEEDKKHERHPIFGNIVDEVAYHEKYPTIYHLRKKLVDSTDKADLRLIYLALAHMIKFRGHFLIEGDLNPDNSDVDKLFIQLVQTYNQLFEENPINASGVDAKAILSARLSKSRRLENLIAQLPGEKKNGLFGNLIALSLGLTPNFKSNFDLAEDAKLQLSKDTYDDDLDNLLAQIGDQYADLFLAAKNLSDAILLSDILRVNTEITKAPLSASMIKRYDEHHQDLTLLKALVRQQLPEKYKEIFFDQSKNGYAGYIDGGASQEEFYKFIKPILEKMDGTEELLVKLNREDLLRKQRTFDNGSIPHQIHLGELHAILRRQEDFYPFLKDNREKIEKILTFRIPYYVGPLARGNSRFAWMTRKSEETITPWNFEEVVDKGASAQSFIERMTNFDKNLPNEKVLPKHSLLYEYFTVYNELTKVKYVTEGMRKPAFLSGEQKKAIVDLLFKTNRKVTVKQLKEDYFKKIECFDSVEISGVEDRFNASLGTYHDLLKIIKDKDFLDNEENEDILEDIVLTLTLFEDREMIEERLKTYAHLFDDKVMKQLKRRRYTGWGRLSRKLINGIRDKQSGKTILDFLKSDGFANRNFMQLIHDDSLTFKEDIQKAQVSGQGDSLHEHIANLAGSPAIKKGILQTVKVVDELVKVMGRHKPENIVIEMARENQTTQKGQKNSRERMKRIEEGIKELGSQILKEHPVENTQLQNEKLYLYYLQNGRDMYVDQELDINRLSDYDVDHIVPQSFLKDDSIDNKVLTRSDKARGKSDNVPSEEVVKKMKNYWRQLLNAKLITQRKFDNLTKAERGGLSELDKAGFIKRQLVETRQITKHVAQILDSRMNTKYDENDKLIREVKVITLKSKLVSDFRKDFQFYKVREINNYHHAHDAYLNAVVGTALIKKYPKLESEFVYGDYKVYDVRKMIAKSEQEIGKATAKYFFYSNIMNFFKTEITLANGEIRKRPLIETNGETGEIVWDKGRDFATVRKVLSMPQVNIVKKTEVQTGGFSKESILPKRNSDKLIARKKDWDPKKYGGFDSPTVAYSVLVVAKVEKGKSKKLKSVKELLGITIMERSSFEKNPIDFLEAKGYKEVKKDLIIKLPKYSLFELENGRKRMLASAGELQKGNELALPSKYVNFLYLASHYEKLKGSPEDNEQKQLFVEQHKHYLDEIIEQISEFSKRVILADANLDKVLSAYNKHRDKPIREQAENIIHLFTLTNLGAPAAFKYFDTTIDRKRYTSTKEVLDATLIHQSITGLYETRIDLSQLGGDGGEAAAKPAPGGGGGTLQLEEEYRLFEPESTQKQEMDIWLKNFPQAWAETGGMGTAHCQAPVLIQLKATATPISIRQYPMPHEAYQGIKPHIRRMLDQGILKPCQSPWNTPLLPVKKPGTEDYRPVQDLREVNKRVEDIHPTVPNPYNLLSTLPPSHPWYTVLDLKDAFFCLRLHSESQLLFAFEWRDPEIGLSGQLTWTRLPQGFKNSPTLFNEALHSDLADFRVRYPALVLLQYVDDLLLAAATRTECLEGTKALLETLGNKGYRASAKKAQICLQEVTYLGYSLKDGQRWLTKARKEAILSIPVPKNSRQVREFLGKAGYCRLFIPGFAELAAPLYPLTRPGTLFQWGTEQQLAFEDIKKALLSSPALGLPDITKPFELFIDENSGFAKGVLVQKLGPWKRPVAYLSKKLDTVASGWPPCLRMVAAIAILVKDAGKLTLGQPLTILTSHPVEALVRQPPNKWLSNARMTHYQAMLLDAERVHFGPTVSLNPATLLPLPSGGNHHDCLQILAETHGTRPDLTDQPLPDADLTWYTDGSSFIRNGEREAGAAVTTESEVIWAAPLPPGTSAQRAELIALTQALKMAEGKKLTVYTDSRYAFATTHVHGEIYRRRGWLTSEGKEIKNKNEILALLEALFLPKRLSIIHCPGHQKGDSPQAKGNRLADDTAKKAATETHSSLTVLPAGKRTADGSEFEKRTADGSEFESPKKKAKVE

SEQ ID NO: 7503 - protein, 2176 aa, synthetic construct
MPAAKRVKLDGGDKKYSIGLDIGTNSVGWAVITDEYKVPSKKFKVLGNTDRHSIKKNLIGALLFDSGETAEATRLKRTARRRYTRRKNRICYLQEIFSNEMAKVDDSFFHRLEESFLVEEDKKHERHPIFGNIVDEVAYHEKYPTIYHLRKKLVDSTDKADLRLIYLALAHMIKFRGHFLIEGDLNPDNSDVDKLFIQLVQTYNQLFEENPINASGVDAKAILSARLSKSRRLENLIAQLPGEKKNGLFGNLIALSLGLTPNFKSNFDLAEDAKLQLSKDTYDDDLDNLLAQIGDQYADLFLAAKNLSDAILLSDILRVNTEITKAPLSASMIKRYDEHHQDLTLLKALVRQQLPEKYKEIFFDQSKNGYAGYIDGGASQEEFYKFIKPILEKMDGTEELLVKLNREDLLRKQRTFDNGSIPHQIHLGELHAILRRQEDFYPFLKDNREKIEKILTFRIPYYVGPLARGNSRFAWMTRKSEETITPWNFEEVVDKGASAQSFIERMTNFDKNLPNEKVLPKHSLLYEYFTVYNELTKVKYVTEGMRKPAFLSGEQKKAIVDLLFKTNRKVTVKQLKEDYFKKIECFDSVEISGVEDRFNASLGTYHDLLKIIKDKDFLDNEENEDILEDIVLTLTLFEDREMIEERLKTYAHLFDDKVMKQLKRRRYTGWGRLSRKLINGIRDKQSGKTILDFLKSDGFANRNFMQLIHDDSLTFKEDIQKAQVSGQGDSLHEHIANLAGSPAIKKGILQTVKVVDELVKVMGRHKPENIVIEMARENQTTQKGQKNSRERMKRIEEGIKELGSQILKEHPVENTQLQNEKLYLYYLQNGRDMYVDQELDINRLSDYDVDHIVPQSFLKDDSIDNKVLTRSDKARGKSDNVPSEEVVKKMKNYWRQLLNAKLITQRKFDNLTKAERGGLSELDKAGFIKRQLVETRQITKHVAQILDSRMNTKYDENDKLIREVKVITLKSKLVSDFRKDFQFYKVREINNYHHAHDAYLNAVVGTALIKKYPKLESEFVYGDYKVYDVRKMIAKSEQEIGKATAKYFFYSNIMNFFKTEITLANGEIRKRPLIETNGETGEIVWDKGRDFATVRKVLSMPQVNIVKKTEVQTGGFSKESILPKRNSDKLIARKKDWDPKKYGGFDSPTVAYSVLVVAKVEKGKSKKLKSVKELLGITIMERSSFEKNPIDFLEAKGYKEVKKDLIIKLPKYSLFELENGRKRMLASAGELQKGNELALPSKYVNFLYLASHYEKLKGSPEDNEQKQLFVEQHKHYLDEIIEQISEFSKRVILADANLDKVLSAYNKHRDKPIREQAENIIHLFTLTNLGAPAAFKYFDTTIDRKRYTSTKEVLDATLIHQSITGLYETRIDLSQLGGDGGEAAAKPAPGGGGGMNPLQLLQPLPAEIKGTKLLAHWNSGATITCIPESFLEDEQPIKKTLIKTIHGEKQQNVYYVTFKVKGRKVEAEVIASPYEYILLSPTDVPWLTQQPLQLTILVPLQEYQEKILSKTALPEDQKQQLKTLFVKYDNLWQHWENQVGHRKIRPHNIATGDYPPRPQKQYPINPKAKPSIQIVIDDLLKQGVLTPQNSTMNTPVYPVPKPDGRWRMVLDYREVNKTIPLTAAQNQHSAGILATIVRQKYKTTLDLANGFWAHPITPESYWLTAFTWQGKQYCWTRLPQGFLNSPALFNADVVDLLKEIPNVQVYVDDIYLSHDDPKEHVQQLEKVFQILLQAGYVVSLKKSEIGQKTVEFLGFNITKEGRGLTDTFKTKLLNITPPKDLKQLQSILGLLNFARNFIPNFAELVQPLYNLIAPAKGKYIEWSEENTKQLNMVIEALNTASNLEERLPEQRLVIKVNTSPSAGYVRYYNETGKKPIMYLNYVFSKAELKFSMLEKLLTTMHKALIKAMDLAMGQEILVYSPIVSMTKIQKTPLPERKALPIRWITWMTYLEDPRIQFHYDKTLPELKHIPDVYTSSQSPVKHPSQYEGVFYTDGSAIKSPDPTKSNNAGMGIVHATYKPEYQVLNQWSIPLGNHTAQMAEIAAVEFACKKALKIPGPVLVITDSFYVAESANKELPYWKSNGFVNNKKKPLKHISKWKSIAECLSMKPDITIQHEKGISLQIPVFILKGNALADKLATQGSYVVNAGKRTADGSEFEKRTADGSEFESPKKKAKVE

SEQ ID NO: 7504 - protein, 2094 aa, synthetic construct
MPAAKRVKLDGGDKKYSIGLDIGTNSVGWAVITDEYKVPSKKFKVLGNTDRHSIKKNLIGALLFDSGETAEATRLKRTARRRYTRRKNRICYLQEIFSNEMAKVDDSFFHRLEESFLVEEDKKHERHPIFGNIVDEVAYHEKYPTIYHLRKKLVDSTDKADLRLIYLALAHMIKFRGHFLIEGDLNPDNSDVDKLFIQLVQTYNQLFEENPINASGVDAKAILSARLSKSRRLENLIAQLPGEKKNGLFGNLIALSLGLTPNFKSNFDLAEDAKLQLSKDTYDDDLDNLLAQIGDQYADLFLAAKNLSDAILLSDILRVNTEITKAPLSASMIKRYDEHHQDLTLLKALVRQQLPEKYKEIFFDQSKNGYAGYIDGGASQEEFYKFIKPILEKMDGTEELLVKLNREDLLRKQRTFDNGSIPHQIHLGELHAILRRQEDFYPFLKDNREKIEKILTFRIPYYVGPLARGNSRFAWMTRKSEETITPWNFEEVVDKGASAQSFIERMTNFDKNLPNEKVLPKHSLLYEYFTVYNELTKVKYVTEGMRKPAFLSGEQKKAIVDLLFKTNRKVTVKQLKEDYFKKIECFDSVEISGVEDRFNASLGTYHDLLKIIKDKDFLDNEENEDILEDIVLTLTLFEDREMIEERLKTYAHLFDDKVMKQLKRRRYTGWGRLSRKLINGIRDKQSGKTILDFLKSDGFANRNFMQLIHDDSLTFKEDIQKAQVSGQGDSLHEHIANLAGSPAIKKGILQTVKVVDELVKVMGRHKPENIVIEMARENQTTQKGQKNSRERMKRIEEGIKELGSQILKEHPVENTQLQNEKLYLYYLQNGRDMYVDQELDINRLSDYDVDHIVPQSFLKDDSIDNKVLTRSDKARGKSDNVPSEEVVKKMKNYWRQLLNAKLITQRKFDNLTKAERGGLSELDKAGFIKRQLVETRQITKHVAQILDSRMNTKYDENDKLIREVKVITLKSKLVSDFRKDFQFYKVREINNYHHAHDAYLNAVVGTALIKKYPKLESEFVYGDYKVYDVRKMIAKSEQEIGKATAKYFFYSNIMNFFKTEITLANGEIRKRPLIETNGETGEIVWDKGRDFATVRKVLSMPQVNIVKKTEVQTGGFSKESILPKRNSDKLIARKKDWDPKKYGGFDSPTVAYSVLVVAKVEKGKSKKLKSVKELLGITIMERSSFEKNPIDFLEAKGYKEVKKDLIIKLPKYSLFELENGRKRMLASAGELQKGNELALPSKYVNFLYLASHYEKLKGSPEDNEQKQLFVEQHKHYLDEIIEQISEFSKRVILADANLDKVLSAYNKHRDKPIREQAENIIHLFTLTNLGAPAAFKYFDTTIDRKRYTSTKEVLDATLIHQSITGLYETRIDLSQLGGDGGEAAAKPAPGGGGGVLNLEEEYRLHEKPVPSSIDPSWLQLFPTVWAERAGMGLANQVPPVVVELRSGASPVAVRQYPMSKEAREGIRPHIQKFLDLGVLVPCRSPWNTPLLPVKKPGTNDYRPVQDLREINKRVQDIHPTVPNPYNLLSSLPPSYTWYSVLDLKDAFFCLRLHPNSQPLFAFEWKDPEKGNTGQLTWTRLPQGFKNSPTLFNEALHRDLAPFRALNPQVVLLQYVDDLLVAAPTYEDCKKGTQKLLQELSKLGYRVSAKKAQLCQREVTYLGYLLKEGKRWLTPARKATVMKIPVPTTPRQVREFLGKAGFCRLFIPGFASLAAPLYPLTKPSIPFIWTEEHQQAFDHIKKALLSAPALALPDLTKPFTLYIDERAGVARGVLTQTLGPWRRPVAYLSKKLDPVASGWPTCLKAVAAVALLLKDADKLTLGQNVTVIASHSLESIVRQPPDRWMTNARMTHYQSLLLNERVSFAPPAVLNPATLLPVESEATPVHRCSEILAEETGTRRDLEDQPLPGVPTWYTDGSSFITEGKRRAGAPIVDGKRTVWASSLPEGTSAQKAELVALTQALRLAEGKNINIYTDSRYAFATAHIHGAIYKQRGWLTSAGKDIKNKEEILALLEAIHLPRRVAIIHCPGHQRGSNPVATGNRRADEAAKQAALSTRVLAGTTKPAGKRTADGSEFEKRTADGSEFESPKKKAKVE

SEQ ID NO: 7505 - protein, 2218 aa, synthetic construct
MPAAKRVKLDGGDKKYSIGLDIGTNSVGWAVITDEYKVPSKKFKVLGNTDRHSIKKNLIGALLFDSGETAEATRLKRTARRRYTRRKNRICYLQEIFSNEMAKVDDSFFHRLEESFLVEEDKKHERHPIFGNIVDEVAYHEKYPTIYHLRKKLVDSTDKADLRLIYLALAHMIKFRGHFLIEGDLNPDNSDVDKLFIQLVQTYNQLFEENPINASGVDAKAILSARLSKSRRLENLIAQLPGEKKNGLFGNLIALSLGLTPNFKSNFDLAEDAKLQLSKDTYDDDLDNLLAQIGDQYADLFLAAKNLSDAILLSDILRVNTEITKAPLSASMIKRYDEHHQDLTLLKALVRQQLPEKYKEIFFDQSKNGYAGYIDGGASQEEFYKFIKPILEKMDGTEELLVKLNREDLLRKQRTFDNGSIPHQIHLGELHAILRRQEDFYPFLKDNREKIEKILTFRIPYYVGPLARGNSRFAWMTRKSEETITPWNFEEVVDKGASAQSFIERMTNFDKNLPNEKVLPKHSLLYEYFTVYNELTKVKYVTEGMRKPAFLSGEQKKAIVDLLFKTNRKVTVKQLKEDYFKKIECFDSVEISGVEDRFNASLGTYHDLLKIIKDKDFLDNEENEDILEDIVLTLTLFEDREMIEERLKTYAHLFDDKVMKQLKRRRYTGWGRLSRKLINGIRDKQSGKTILDFLKSDGFANRNFMQLIHDDSLTFKEDIQKAQVSGQGDSLHEHIANLAGSPAIKKGILQTVKVVDELVKVMGRHKPENIVIEMARENQTTQKGQKNSRERMKRIEEGIKELGSQILKEHPVENTQLQNEKLYLYYLQNGRDMYVDQELDINRLSDYDVDHIVPQSFLKDDSIDNKVLTRSDKARGKSDNVPSEEVVKKMKNYWRQLLNAKLITQRKFDNLTKAERGGLSELDKAGFIKRQLVETRQITKHVAQILDSRMNTKYDENDKLIREVKVITLKSKLVSDFRKDFQFYKVREINNYHHAHDAYLNAVVGTALIKKYPKLESEFVYGDYKVYDVRKMIAKSEQEIGKATAKYFFYSNIMNFFKTEITLANGEIRKRPLIETNGETGEIVWDKGRDFATVRKVLSMPQVNIVKKTEVQTGGFSKESILPKRNSDKLIARKKDWDPKKYGGFDSPTVAYSVLVVAKVEKGKSKKLKSVKELLGITIMERSSFEKNPIDFLEAKGYKEVKKDLIIKLPKYSLFELENGRKRMLASAGELQKGNELALPSKYVNFLYLASHYEKLKGSPEDNEQKQLFVEQHKHYLDEIIEQISEFSKRVILADANLDKVLSAYNKHRDKPIREQAENIIHLFTLTNLGAPAAFKYFDTTIDRKRYTSTKEVLDATLIHQSITGLYETRIDLSQLGGDGGEAAAKPAPGGGGGTLGDQGSRGSDPLPEPRVTLTVEGIPTEFLVNTGAEHSVLTKPMGKMGSKRTVVAGATGSKVYPWTTKRLLKIGQKQVTHSFLVIPECPAPLLGRDLLTKLKAQIQFSTEGPQVTWEDRPAMCLVLNLEEEYRLHEKPVPPSIDPSWLQLFPMVWAEKAGMGLANQVPPVVVELKSDASPVAVRQYPMSKEAREGIRPHIQRFLDLGILVPCQSPWNTPLLPVKKPGTNDYRPVQDLREVNKRVQDIHPTVPNPYNLLSSLPPSHTWYSVLDLKDAFFCLKLHPNSQPLFAFEWRDPEKGNTGQLTWTRLPQGFKNSPTLFNEALHRDLASFRALNPQVVMLQYVDDLLVAAPTYRDCKEGTRRLLQELSKLGYRVSAKKAQLCREEVTYLGYLLKGGKRWLTPARKATVMKIPTPTTPRQVREFLGKAGFCRLFIPGFASLAAPLYPLTRPKVPFTWTEAHQEAFGRIKEALLSAPALALPDLTKPFALYVDEKEGVARGVLTQTLGPWRRPVAYLSKKLDPVASGWPTCLKAIAAVALLLKDADKLTLGQNVLVIAPHNLESIVRQPPDRWMTNARMTHYQSLLLNERVSFAPPAILNPATLLPVESDDTPIHICSEILAEETGTRPDLRDQPLPGVPAWYTDGSSFIMDGRRQAGAAIVDNKRTVWASNLPEGTSAQKAELIALTQALRLAEGKSINIYTDSRYAFATAHVHGAIYKQRGWLTSAGKDIKNKEEILALLEAIHLPKRVAIIHCPGHQRGTDPVATGNRKADEAAKQAAQSTRILTETTKNAGKRTADGSEFEKRTADGSEFESPKKKAKVE

SEQ ID NO: 7506 - protein, 2096 aa, synthetic construct
MPAAKRVKLDGGDKKYSIGLDIGTNSVGWAVITDEYKVPSKKFKVLGNTDRHSIKKNLIGALLFDSGETAEATRLKRTARRRYTRRKNRICYLQEIFSNEMAKVDDSFFHRLEESFLVEEDKKHERHPIFGNIVDEVAYHEKYPTIYHLRKKLVDSTDKADLRLIYLALAHMIKFRGHFLIEGDLNPDNSDVDKLFIQLVQTYNQLFEENPINASGVDAKAILSARLSKSRRLENLIAQLPGEKKNGLFGNLIALSLGLTPNFKSNFDLAEDAKLQLSKDTYDDDLDNLLAQIGDQYADLFLAAKNLSDAILLSDILRVNTEITKAPLSASMIKRYDEHHQDLTLLKALVRQQLPEKYKEIFFDQSKNGYAGYIDGGASQEEFYKFIKPILEKMDGTEELLVKLNREDLLRKQRTFDNGSIPHQIHLGELHAILRRQEDFYPFLKDNREKIEKILTFRIPYYVGPLARGNSRFAWMTRKSEETITPWNFEEVVDKGASAQSFIERMTNFDKNLPNEKVLPKHSLLYEYFTVYNELTKVKYVTEGMRKPAFLSGEQKKAIVDLLFKTNRKVTVKQLKEDYFKKIECFDSVEISGVEDRFNASLGTYHDLLKIIKDKDFLDNEENEDILEDIVLTLTLFEDREMIEERLKTYAHLFDDKVMKQLKRRRYTGWGRLSRKLINGIRDKQSGKTILDFLKSDGFANRNFMQLIHDDSLTFKEDIQKAQVSGQGDSLHEHIANLAGSPAIKKGILQTVKVVDELVKVMGRHKPENIVIEMARENQTTQKGQKNSRERMKRIEEGIKELGSQILKEHPVENTQLQNEKLYLYYLQNGRDMYVDQELDINRLSDYDVDHIVPQSFLKDDSIDNKVLTRSDKARGKSDNVPSEEVVKKMKNYWRQLLNAKLITQRKFDNLTKAERGGLSELDKAGFIKRQLVETRQITKHVAQILDSRMNTKYDENDKLIREVKVITLKSKLVSDFRKDFQFYKVREINNYHHAHDAYLNAVVGTALIKKYPKLESEFVYGDYKVYDVRKMIAKSEQEIGKATAKYFFYSNIMNFFKTEITLANGEIRKRPLIETNGETGEIVWDKGRDFATVRKVLSMPQVNIVKKTEVQTGGFSKESILPKRNSDKLIARKKDWDPKKYGGFDSPTVAYSVLVVAKVEKGKSKKLKSVKELLGITIMERSSFEKNPIDFLEAKGYKEVKKDLIIKLPKYSLFELENGRKRMLASAGELQKGNELALPSKYVNFLYLASHYEKLKGSPEDNEQKQLFVEQHKHYLDEIIEQISEFSKRVILADANLDKVLSAYNKHRDKPIREQAENIIHLFTLTNLGAPAAFKYFDTTIDRKRYTSTKEVLDATLIHQSITGLYETRIDLSQLGGDGGEAAAKPAPGGGGGTLNLEDEYRLYETSAEPEVSPGSTWLSDFPQAWAETGGMGLAVRQAPLIIPLKATSTPVSIKQYPMSQEAKLGIKPHIQRLLDQGILVPCQSPWNTPLLPVKKPGTNDYRPVQDLREVNKRVEDIHPTVPNPYNLLSGLPPSHRWYTVLDLKDAFFCLRLHPTSQPLFAFEWRDPGMGISGQLTWTRLPQGFKNSPTLFDEALHRDLADFRIQHPDLILLQYVDDILLAATSELDCQQGTRALLLTLGNLGYRASAKKAQLCQKQVKYLGYLLKEGQRWLTEARKETVMGQPTPKTPRQLREFLGTAGFCRLWIPGFAEMAAPLYPLTKTGTLFNWGPDQQKAYQEIKQALLTAPALGLPDLTKPFELFVDEKQGYAKGVLTQKLGPWRRPVAYLSKKLDPVAAGWPPCLRMVAAIAVLRKDAGKLTMGQPLVILAPHAVEALVKQPPDRWLSNARMTHYQAMLLDTDRVQFGPVVALNPATLLPLPEEGAPHDCLEILAETHGTRPDLTDQPIPDADHTWYTDGSSFLQEGQRKAGAAVTTETEVIWARALPAGTSAQRAELIALTQALKMAEGKRLNVYTDSRYAFATAHIHGEIYRRRGLLTSEGREIKNKSEILALLKALFLPKRLSIIHCLGHQKGDSAEARGNRLADQAAREAAIKTPPDTSTLLAGKRTADGSEFEKRTADGSEFESPKKKAKVE

SEQ ID NO: 7507 - protein, 2096 aa, synthetic construct
MPAAKRVKLDGGDKKYSIGLDIGTNSVGWAVITDEYKVPSKKFKVLGNTDRHSIKKNLIGALLFDSGETAEATRLKRTARRRYTRRKNRICYLQEIFSNEMAKVDDSFFHRLEESFLVEEDKKHERHPIFGNIVDEVAYHEKYPTIYHLRKKLVDSTDKADLRLIYLALAHMIKFRGHFLIEGDLNPDNSDVDKLFIQLVQTYNQLFEENPINASGVDAKAILSARLSKSRRLENLIAQLPGEKKNGLFGNLIALSLGLTPNFKSNFDLAEDAKLQLSKDTYDDDLDNLLAQIGDQYADLFLAAKNLSDAILLSDILRVNTEITKAPLSASMIKRYDEHHQDLTLLKALVRQQLPEKYKEIFFDQSKNGYAGYIDGGASQEEFYKFIKPILEKMDGTEELLVKLNREDLLRKQRTFDNGSIPHQIHLGELHAILRRQEDFYPFLKDNREKIEKILTFRIPYYVGPLARGNSRFAWMTRKSEETITPWNFEEVVDKGASAQSFIERMTNFDKNLPNEKVLPKHSLLYEYFTVYNELTKVKYVTEGMRKPAFLSGEQKKAIVDLLFKTNRKVTVKQLKEDYFKKIECFDSVEISGVEDRFNASLGTYHDLLKIIKDKDFLDNEENEDILEDIVLTLTLFEDREMIEERLKTYAHLFDDKVMKQLKRRRYTGWGRLSRKLINGIRDKQSGKTILDFLKSDGFANRNFMQLIHDDSLTFKEDIQKAQVSGQGDSLHEHIANLAGSPAIKKGILQTVKVVDELVKVMGRHKPENIVIEMARENQTTQKGQKNSRERMKRIEEGIKELGSQILKEHPVENTQLQNEKLYLYYLQNGRDMYVDQELDINRLSDYDVDHIVPQSFLKDDSIDNKVLTRSDKARGKSDNVPSEEVVKKMKNYWRQLLNAKLITQRKFDNLTKAERGGLSELDKAGFIKRQLVETRQITKHVAQILDSRMNTKYDENDKLIREVKVITLKSKLVSDFRKDFQFYKVREINNYHHAHDAYLNAVVGTALIKKYPKLESEFVYGDYKVYDVRKMIAKSEQEIGKATAKYFFYSNIMNFFKTEITLANGEIRKRPLIETNGETGEIVWDKGRDFATVRKVLSMPQVNIVKKTEVQTGGFSKESILPKRNSDKLIARKKDWDPKKYGGFDSPTVAYSVLVVAKVEKGKSKKLKSVKELLGITIMERSSFEKNPIDFLEAKGYKEVKKDLIIKLPKYSLFELENGRKRMLASAGELQKGNELALPSKYVNFLYLASHYEKLKGSPEDNEQKQLFVEQHKHYLDEIIEQISEFSKRVILADANLDKVLSAYNKHRDKPIREQAENIIHLFTLTNLGAPAAFKYFDTTIDRKRYTSTKEVLDATLIHQSITGLYETRIDLSQLGGDGGEAAAKPAPGGGGGTLNLEDEYRLYETSAEPEVSPGSTWLSDFPQAWAETGGMGLAVRQAPLIIPLKATSTPVSIKQYPMSQEAKLGIKPHIQRLLDQGILVPCQSPWNTPLLPVKKPGTNDYRPVQDLREVNKRVEDIHPTVPNPYNLLSGLPPSHRWYTVLDLKDAFFCLRLHPTSQPLFAFEWRDPGMGISGQLTWTRLPQGFKNSPTLFNEALHRDLADFRIQHPDLILLQYVDDILLAATSELDCQQGTRALLLTLGNLGYRASAKKAQLCQKQVKYLGYLLKEGQRWLTEARKETVMGQPTPKTPRQLREFLGTAGFCRLWIPGFAEMAAPLYPLTKPGTLFNWGPDQQKAYQEIKQALLTAPALGLPDLTKPFELFVDEKQGYAKGVLTQKLGPWRRPVAYLSKKLDPVAAGWPPCLRMVAAIAVLRKDAGKLTMGQPLVILAPHAVEALVKQPPDRWLSNARMTHYQAMLLDTDRVQFGPVVALNPATLLPLPEEGAPHDCLEILAETHGTRPDLTDQPIPDADHTWYTDGSSFLQEGQRKAGAAVTTETEVIWARALPAGTSAQRAELIALTQALKMAEGKRLNVYTDSRYAFATAHIHGEIYRRRGWLTSEGREIKNKSEILALLKALFLPKRLSIIHCLGHQKGDSAEARGNRLADQAAREAAIKTPPDTSTLLAGKRTADGSEFEKRTADGSEFESPKKKAKVE

SEQ ID NO: 7508 - protein, 2096 aa, synthetic construct
MPAAKRVKLDGGDKKYSIGLDIGTNSVGWAVITDEYKVPSKKFKVLGNTDRHSIKKNLIGALLFDSGETAEATRLKRTARRRYTRRKNRICYLQEIFSNEMAKVDDSFFHRLEESFLVEEDKKHERHPIFGNIVDEVAYHEKYPTIYHLRKKLVDSTDKADLRLIYLALAHMIKFRGHFLIEGDLNPDNSDVDKLFIQLVQTYNQLFEENPINASGVDAKAILSARLSKSRRLENLIAQLPGEKKNGLFGNLIALSLGLTPNFKSNFDLAEDAKLQLSKDTYDDDLDNLLAQIGDQYADLFLAAKNLSDAILLSDILRVNTEITKAPLSASMIKRYDEHHQDLTLLKALVRQQLPEKYKEIFFDQSKNGYAGYIDGGASQEEFYKFIKPILEKMDGTEELLVKLNREDLLRKQRTFDNGSIPHQIHLGELHAILRRQEDFYPFLKDNREKIEKILTFRIPYYVGPLARGNSRFAWMTRKSEETITPWNFEEVVDKGASAQSFIERMTNFDKNLPNEKVLPKHSLLYEYFTVYNELTKVKYVTEGMRKPAFLSGEQKKAIVDLLFKTNRKVTVKQLKEDYFKKIECFDSVEISGVEDRFNASLGTYHDLLKIIKDKDFLDNEENEDILEDIVLTLTLFEDREMIEERLKTYAHLFDDKVMKQLKRRRYTGWGRLSRKLINGIRDKQSGKTILDFLKSDGFANRNFMQLIHDDSLTFKEDIQKAQVSGQGDSLHEHIANLAGSPAIKKGILQTVKVVDELVKVMGRHKPENIVIEMARENQTTQKGQKNSRERMKRIEEGIKELGSQILKEHPVENTQLQNEKLYLYYLQNGRDMYVDQELDINRLSDYDVDHIVPQSFLKDDSIDNKVLTRSDKARGKSDNVPSEEVVKKMKNYWRQLLNAKLITQRKFDNLTKAERGGLSELDKAGFIKRQLVETRQITKHVAQILDSRMNTKYDENDKLIREVKVITLKSKLVSDFRKDFQFYKVREINNYHHAHDAYLNAVVGTALIKKYPKLESEFVYGDYKVYDVRKMIAKSEQEIGKATAKYFFYSNIMNFFKTEITLANGEIRKRPLIETNGETGEIVWDKGRDFATVRKVLSMPQVNIVKKTEVQTGGFSKESILPKRNSDKLIARKKDWDPKKYGGFDSPTVAYSVLVVAKVEKGKSKKLKSVKELLGITIMERSSFEKNPIDFLEAKGYKEVKKDLIIKLPKYSLFELENGRKRMLASAGELQKGNELALPSKYVNFLYLASHYEKLKGSPEDNEQKQLFVEQHKHYLDEIIEQISEFSKRVILADANLDKVLSAYNKHRDKPIREQAENIIHLFTLTNLGAPAAFKYFDTTIDRKRYTSTKEVLDATLIHQSITGLYETRIDLSQLGGDGGEAAAKPAPGGGGGTLGIEDEYRLHETSTEPDVSLGSTWLSDFPQAWAETGGMGLAVRQAPLIIPLKATSTPVSIQQYPMSHEARLGIKPHIQRLLDQGILVPCQSPWNTPLLPVKKPGTNDYRPVQDLREVNKRVEDIHPTVPNPYNLLSGLPPSHQWYTVLDLKDAFFCLRLHPTSQPLFAFEWRDPGMGISGQLTWTRLPQGFKNSPTLFNEALHRDLADFRIQHPDLILLQYVDDILLAATSELDCQQGTRALLQTLGDLGYRASAKKAQICQKQVKYLGYLLREGQRWLTEARKETVMGQPVPKTPRQLREFLGTAGFCRLWIPGFAEMAAPLYPLTKPGTLFSWGPDQQKAYQEIKQALLTAPALGLPDLTKPFELFVDEKQGYAKGVLTQKLGPWRRPVAYLSKKLDPVAAGWPPCLRMVAAIAVLTKDAGKLTMGQPLVILAPHAVEALVKQPPDRWLSNARMTHYQAMLLDTDRVQFGPVVALNPATLLPLPEEGAPHDCLEILAETHGTRPDLTDQPIPDADHTWYTDGSSFLQEGQRKAGAAVTTETEVIWAGALPAGTSAQRAELIALTQALKMAEGKRLNVYTDSRYAFATAHIHGEIYRRRGWLTSEGREIKNKSEILALLKALFLPKRLSIIHCLGHQKGDSAEARGNRLADQAAREAAIKTPPDTSTLLAGKRTADGSEFEKRTADGSEFESPKKKAKVE

SEQ ID NO: 7509 - protein, 2096 aa, synthetic construct; identical to SEQ ID NO: 4536

SEQ ID NO: 7510 - protein, 2096 aa, synthetic construct
MPAAKRVKLDGGDKKYSIGLDIGTNSVGWAVITDEYKVPSKKFKVLGNTDRHSIKKNLIGALLFDSGETAEATRLKRTARRRYTRRKNRICYLQEIFSNEMAKVDDSFFHRLEESFLVEEDKKHERHPIFGNIVDEVAYHEKYPTIYHLRKKLVDSTDKADLRLIYLALAHMIKFRGHFLIEGDLNPDNSDVDKLFIQLVQTYNQLFEENPINASGVDAKAILSARLSKSRRLENLIAQLPGEKKNGLFGNLIALSLGLTPNFKSNFDLAEDAKLQLSKDTYDDDLDNLLAQIGDQYADLFLAAKNLSDAILLSDILRVNTEITKAPLSASMIKRYDEHHQDLTLLKALVRQQLPEKYKEIFFDQSKNGYAGYIDGGASQEEFYKFIKPILEKMDGTEELLVKLNREDLLRKQRTFDNGSIPHQIHLGELHAILRRQEDFYPFLKDNREKIEKILTFRIPYYVGPLARGNSRFAWMTRKSEETITPWNFEEVVDKGASAQSFIERMTNFDKNLPNEKVLPKHSLLYEYFTVYNELTKVKYVTEGMRKPAFLSGEQKKAIVDLLFKTNRKVTVKQLKEDYFKKIECFDSVEISGVEDRFNASLGTYHDLLKIIKDKDFLDNEENEDILEDIVLTLTLFEDREMIEERLKTYAHLFDDKVMKQLKRRRYTGWGRLSRKLINGIRDKQSGKTILDFLKSDGFANRNFMQLIHDDSLTFKEDIQKAQVSGQGDSLHEHIANLAGSPAIKKGILQTVKVVDELVKVMGRHKPENIVIEMARENQTTQKGQKNSRERMKRIEEGIKELGSQILKEHPVENTQLQNEKLYLYYLQNGRDMYVDQELDINRLSDYDVDHIVPQSFLKDDSIDNKVLTRSDKARGKSDNVPSEEVVKKMKNYWRQLLNAKLITQRKFDNLTKAERGGLSELDKAGFIKRQLVETRQITKHVAQILDSRMNTKYDENDKLIREVKVITLKSKLVSDFRKDFQFYKVREINNYHHAHDAYLNAVVGTALIKKYPKLESEFVYGDYKVYDVRKMIAKSEQEIGKATAKYFFYSNIMNFFKTEITLANGEIRKRPLIETNGETGEIVWDKGRDFATVRKVLSMPQVNIVKKTEVQTGGFSKESILPKRNSDKLIARKKDWDPKKYGGFDSPTVAYSVLVVAKVEKGKSKKLKSVKELLGITIMERSSFEKNPIDFLEAKGYKEVKKDLIIKLPKYSLFELENGRKRMLASAGELQKGNELALPSKYVNFLYLASHYEKLKGSPEDNEQKQLFVEQHKHYLDEIIEQISEFSKRVILADANLDKVLSAYNKHRDKPIREQAENIIHLFTLTNLGAPAAFKYFDTTIDRKRYTSTKEVLDATLIHQSITGLYETRIDLSQLGGDGGEAAAKPAPGGGGGTLNIEDEYRLHETSKGPDVPLGSTWLSDFPQAWAETGGMGLAVRQAPLIIPLKATSTPVSIKQYPMSQEARLGIKPHIQRLLDQGILVPCQSPWNTPLLPVKKPGTNDYRPVQDLREVNKRVEDIHPTVPNPYNLLSGLPPSHQWYTVLDLKDAFFCLRLHPTSQSLFAFEWRDPEMGISGQLTWTRLPQGFKNSPTLFNEALHRDLADFRIQHPDLILLQYVDDLLLAATSELDCQQGTRALLQTLGDLGYRASAKKAQICQKQVKYLGYLLKEGQRWLTEARKETVMGQPTPKTPRQLREFLGTAGFCRLWIPGFAEMAAPLYPLTKPGTLFEWGPDQQKAYQEIKQALLTAPALGLPDLTKPFELFVDEKQGYAKGVLTQKLGPWRRPVAYLSKKLDPVAAGWPPCLRMVAAIAVLTKDAGKLTMGQPLVILAPHAVEALVKQPPDRWLSNARMTHYQALLLDTDRVQFGPIVALNPATLLPLPEEGLQHDCLDILAEAHGTRPDLTDQPLPDADHTWYTDGSSFLQEGQRKAGAAVTTETEVVWAKALPAGTSAQRAELIALTQALKMAEGKKLNVYTDSRYAFATAHIHGEIYRRRGWLTSEGKEIKNKDEILALLKALFLPKRLSIIHCPGHQKGNRAEARGNRMADQAAREVATRETPETSTLLAGKRTADGSEFEKRTADGSEFESPKKKAKVE

SEQ ID NO: 7511 - protein, 2096 aa, synthetic construct
MPAAKRVKLDGGDKKYSIGLDIGTNSVGWAVITDEYKVPSKKFKVLGNTDRHSIKKNLIGALLFDSGETAEATRLKRTARRRYTRRKNRICYLQEIFSNEMAKVDDSFFHRLEESFLVEEDKKHERHPIFGNIVDEVAYHEKYPTIYHLRKKLVDSTDKADLRLIYLALAHMIKFRGHFLIEGDLNPDNSDVDKLFIQLVQTYNQLFEENPINASGVDAKAILSARLSKSRRLENLIAQLPGEKKNGLFGNLIALSLGLTPNFKSNFDLAEDAKLQLSKDTYDDDLDNLLAQIGDQYADLFLAAKNLSDAILLSDILRVNTEITKAPLSASMIKRYDEHHQDLTLLKALVRQQLPEKYKEIFFDQSKNGYAGYIDGGASQEEFYKFIKPILEKMDGTEELLVKLNREDLLRKQRTFDNGSIPHQIHLGELHAILRRQEDFYPFLKDNREKIEKILTFRIPYYVGPLARGNSRFAWMTRKSEETITPWNFEEVVDKGASAQSFIERMTNFDKNLPNEKVLPKHSLLYEYFTVYNELTKVKYVTEGMRKPAFLSGEQKKAIVDLLFKTNRKVTVKQLKEDYFKKIECFDSVEISGVEDRFNASLGTYHDLLKIIKDKDFLDNEENEDILEDIVLTLTLFEDREMIEERLKTYAHLFDDKVMKQLKRRRYTGWGRLSRKLINGIRDKQSGKTILDFLKSDGFANRNFMQLIHDDSLTFKEDIQKAQVSGQGDSLHEHIANLAGSPAIKKGILQTVKVVDELVKVMGRHKPENIVIEMARENQTTQKGQKNSRERMKRIEEGIKELGSQILKEHPVENTQLQNEKLYLYYLQNGRDMYVDQELDINRLSDYDVDHIVPQSFLKDDSIDNKVLTRSDKARGKSDNVPSEEVVKKMKNYWRQLLNAKLITQRKFDNLTKAERGGLSELDKAGFIKRQLVETRQITKHVAQILDSRMNTKYDENDKLIREVKVITLKSKLVSDFRKDFQFYKVREINNYHHAHDAYLNAVVGTALIKKYPKLESEFVYGDYKVYDVRKMIAKSEQEIGKATAKYFFYSNIMNFFKTEITLANGEIRKRPLIETNGETGEIVWDKGRDFATVRKVLSMPQVNIVKKTEVQTGGFSKESILPKRNSDKLIARKKDWDPKKYGGFDSPTVAYSVLVVAKVEKGKSKKLKSVKELLGITIMERSSFEKNPIDFLEAKGYKEVKKDLIIKLPKYSLFELENGRKRMLASAGELQKGNELALPSKYVNFLYLASHYEKLKGSPEDNEQKQLFVEQHKHYLDEIIEQISEFSKRVILADANLDKVLSAYNKHRDKPIREQAENIIHLFTLTNLGAPAAFKYFDTTIDRKRYTSTKEVLDATLIHQSITGLYETRIDLSQLGGDGGEAAAKPAPGGGGGTLNIEDEHRLHETSKEPDVSLGSTWLSDFPQAWAETGGMGLAVRQAPLIIPLKATSTPVSIKQYPMSQEARLGIKPHIQRLLDQGILVPCQSPWNTPLLPVKKPGTNDYRPVQDLREVNKRVEDIHPTVPNPYNLLSGLPPSHQWYTVLDLKDAFFCLRLHPTSQPLFAFEWRDPEMGISGQLTWTRLPQGFKNSPTLFDEALHRDLADFRIQHPDLILLQYVDDLLLAATSELDCQQGTRALLQTLGNLGYRASAKKAQICQKQVKYLGYLLKEGQRWLTEARKETVMGQPTPKTPRQLREFLGTAGFCRLWIPGFAEMAAPLYPLTKTGTLFNWGPDQQKAYQEIKQALLTAPALGLPDLTKPFELFVDEKQGYAKGVLTQKLGPWRRPVAYLSKKLDPVAAGWPPCLRMVAAIAVLTKDAGKLTMGQPLVILAPHAVEALVKQPPDRWLSNARMTHYQALLLDTDRVQFGPVVALNPATLLPLPEEGLQHNCLDILAEAHGTRPDLTDQPLPDADHTWYTDGSSLLQEGQRKAGAAVTTETEVIWAKALPAGTSAQRAELIALTQALKMAEGKKLNVYTDSRYAFATAHIHGEIYRRRGLLTSEGKEIKNKDEILALLKALFLPKRLSIIHCPGHQKGHSAEARGNRMADQAARKAAITETPDTSTLLAGKRTADGSEFEKRTADGSEFESPKKKAKVE

SEQ ID NO: 7512 - protein, 2024 aa, synthetic construct
MPAAKRVKLDGGDKKYSIGLDIGTNSVGWAVITDEYKVPSKKFKVLGNTDRHSIKKNLIGALLFDSGETAEATRLKRTARRRYTRRKNRICYLQEIFSNEMAKVDDSFFHRLEESFLVEEDKKHERHPIFGNIVDEVAYHEKYPTIYHLRKKLVDSTDKADLRLIYLALAHMIKFRGHFLIEGDLNPDNSDVDKLFIQLVQTYNQLFEENPINASGVDAKAILSARLSKSRRLENLIAQLPGEKKNGLFGNLIALSLGLTPNFKSNFDLAEDAKLQLSKDTYDDDLDNLLAQIGDQYADLFLAAKNLSDAILLSDILRVNTEITKAPLSASMIKRYDEHHQDLTLLKALVRQQLPEKYKEIFFDQSKNGYAGYIDGGASQEEFYKFIKPILEKMDGTEELLVKLNREDLLRKQRTFDNGSIPHQIHLGELHAILRRQEDFYPFLKDNREKIEKILTFRIPYYVGPLARGNSRFAWMTRKSEETITPWNFEEVVDKGASAQSFIERMTNFDKNLPNEKVLPKHSLLYEYFTVYNELTKVKYVTEGMRKPAFLSGEQKKAIVDLLFKTNRKVTVKQLKEDYFKKIECFDSVEISGVEDRFNASLGTYHDLLKIIKDKDFLDNEENEDILEDIVLTLTLFEDREMIEERLKTYAHLFDDKVMKQLKRRRYTGWGRLSRKLINGIRDKQSGKTILDFLKSDGFANRNFMQLIHDDSLTFKEDIQKAQVSGQGDSLHEHIANLAGSPAIKKGILQTVKVVDELVKVMGRHKPENIVIEMARENQTTQKGQKNSRERMKRIEEGIKELGSQILKEHPVENTQLQNEKLYLYYLQNGRDMYVDQELDINRLSDYDVDHIVPQSFLKDDSIDNKVLTRSDKARGKSDNVPSEEVVKKMKNYWRQLLNAKLITQRKFDNLTKAERGGLSELDKAGFIKRQLVETRQITKHVAQILDSRMNTKYDENDKLIREVKVITLKSKLVSDFRKDFQFYKVREINNYHHAHDAYLNAVVGTALIKKYPKLESEFVYGDYKVYDVRKMIAKSEQEIGKATAKYFFYSNIMNFFKTEITLANGEIRKRPLIETNGETGEIVWDKGRDFATVRKVLSMPQVNIVKKTEVQTGGFSKESILPKRNSDKLIARKKDWDPKKYGGFDSPTVAYSVLVVAKVEKGKSKKLKSVKELLGITIMERSSFEKNPIDFLEAKGYKEVKKDLIIKLPKYSLFELENGRKRMLASAGELQKGNELALPSKYVNFLYLASHYEKLKGSPEDNEQKQLFVEQHKHYLDEIIEQISEFSKRVILADANLDKVLSAYNKHRDKPIREQAENIIHLFTLTNLGAPAAFKYFDTTIDRKRYTSTKEVLDATLIHQSITGLYETRIDLSQLGGDGGEAAAKPAPGGGGGGRDIMKDIKVRLMTDSPDDSQDLMIGAIESNLFADQISWKSDQPVWLNQWPLKQEKLQALQQLVTEQLQLGHLEESNSPWNTPVFVIKKKSGKWRLLQDLRAVNATMHDMGALQPGLPSPVAVPKGWEIIIIDLQDCFFNIKLHPEDCKRFAFSVPSPNFKRPYQRFQWKVLPQGMKNSPTLCQKFVDKAILTVRDKYQDSYIVHYMDDILLAHPSRSIVDEILTSMIQALNKHGLVVSTEKIQKYDNLKYLGTHIQGDSVSYQKLQIRTDKLRTLNDFQKLLGNINWIRPFLKLTTGELKPLFEILNGDSNPISTRKLTPEACKALQLMNERLSTARVKRLDLSQPWSLCILKTEYTPTACLWQDGVVEWIHLPHISPKVITPYDIFCTQLIIKGRHRSKELFSKDPDYIVVPYTKVQFDLLLQEKEDWPISLLGFLGEVHFHLPKDPLLTFTLQTAIIFPHMTSTTPLEKGIVIFTDGSANGRSVTYIQGREPIIKENTQNTAQQAEIVAVITAFEEVSQPFNLYTDSKYVTGLFPEIETATLSPRTKIYTELKHLQRLIHKRQEKFYIGHIRGHTGLPGPLAQGNAYADSLTRILTAGKRTADGSEFEKRTADGSEFESPKKKAKVE

SEQ ID NO: 7513 - protein, 2088 aa, synthetic construct
MPAAKRVKLDGGDKKYSIGLDIGTNSVGWAVITDEYKVPSKKFKVLGNTDRHSIKKNLIGALLFDSGETAEATRLKRTARRRYTRRKNRICYLQEIFSNEMAKVDDSFFHRLEESFLVEEDKKHERHPIFGNIVDEVAYHEKYPTIYHLRKKLVDSTDKADLRLIYLALAHMIKFRGHFLIEGDLNPDNSDVDKLFIQLVQTYNQLFEENPINASGVDAKAILSARLSKSRRLENLIAQLPGEKKNGLFGNLIALSLGLTPNFKSNFDLAEDAKLQLSKDTYDDDLDNLLAQIGDQYADLFLAAKNLSDAILLSDILRVNTEITKAPLSASMIKRYDEHHQDLTLLKALVRQQLPEKYKEIFFDQSKNGYAGYIDGGASQEEFYKFIKPILEKMDGTEELLVKLNREDLLRKQRTFDNGSIPHQIHLGELHAILRRQEDFYPFLKDNREKIEKILTFRIPYYVGPLARGNSRFAWMTRKSEETITPWNFEEVVDKGASAQSFIERMTNFDKNLPNEKVLPKHSLLYEYFTVYNELTKVKYVTEGMRKPAFLSGEQKKAIVDLLFKTNRKVTVKQLKEDYFKKIECFDSVEISGVEDRFNASLGTYHDLLKIIKDKDFLDNEENEDILEDIVLTLTLFEDREMIEERLKTYAHLFDDKVMKQLKRRRYTGWGRLSRKLINGIRDKQSGKTILDFLKSDGFANRNFMQLIHDDSLTFKEDIQKAQVSGQGDSLHEHIANLAGSPAIKKGILQTVKVVDELVKVMGRHKPENIVIEMARENQTTQKGQKNSRERMKRIEEGIKELGSQILKEHPVENTQLQNEKLYLYYLQNGRDMYVDQELDINRLSDYDVDHIVPQSFLKDDSIDNKVLTRSDKARGKSDNVPSEEVVKKMKNYWRQLLNAKLITQRKFDNLTKAERGGLSELDKAGFIKRQLVETRQITKHVAQILDSRMNTKYDENDKLIREVKVITLKSKLVSDFRKDFQFYKVREINNYHHAHDAYLNAVVGTALIKKYPKLESEFVYGDYKVYDVRKMIAKSEQEIGKATAKYFFYSNIMNFFKTEITLANGEIRKRPLIETNGETGEIVWDKGRDFATVRKVLSMPQVNIVKKTEVQTGGFSKESILPKRNSDKLIARKKDWDPKKYGGFDSPTVAYSVLVVAKVEKGKSKKLKSVKELLGITIMERSSFEKNPIDFLEAKGYKEVKKDLIIKLPKYSLFELENGRKRMLASAGELQKGNELALPSKYVNFLYLASHYEKLKGSPEDNEQKQLFVEQHKHYLDEIIEQISEFSKRVILADANLDKVLSAYNKHRDKPIREQAENIIHLFTLTNLGAPAAFKYFDTTIDRKRYTSTKEVLDATLIHQSITGLYETRIDLSQLGGDGGEAAAKPAPGGGGGLDDEYRLYSPLVKPDQNIQFWLEQFPQAWAETAGMGLAKQVPPQVIQLKASATPVSVRQYPLSKEAQEGIRPHVQRLIQQGILVPVQSPWNTPLLPVRKPGTNDYRPVQDLREVNKRVQDIHPTVPNPYNLLCALPPQRSWYTVLDLKDAFFCLRLHPTSQPLFAFEWRDPGTGRTGQLTWTRLPQGFKNSPTIFNEALHRDLANFRIQHPQVTLLQYVDDLLLAGATKQDCLEGTKALLLELSDLGYRASAKKAQICRREVTYLGYSLRDGQRWLTEARKKTVVQIPAPTTAKQVREFLGKAGFCRLFIPGFATLAAPLYPLTKPKGEFSWAPEHQKAFDAIKKALLSAPALALPDVTKPFTLYVDERKGVARGVLTQTLGPWRRPVAYLSKKLDPVASGWPVCLKAIAAVAILVKDADKLTLGQNITVIAPHALENIVRQPPDRWMTNARMTHYQSLLLTERVTFAPPAALNPATLLPEETDEPVTHDCHQLLIEETGVRKDLTDIPLTGEVLTWFTDGSSYVVEGKRMAGAAVVDGTRTIWASSLPEGTSAQKAELMALTQALRLAEGKSINIYTDSRYAFATAHVHGAIYKQRGWLTSAGREIKNKEEILSLLEALHLPKRLAIIHCPGHQKAKDPISRGNQMADRVAKQAAQGVNLLPAGKRTADGSEFEKRTADGSEFESPKKKAKVE

SEQ ID NO: 7514 - protein, 2090 aa, synthetic construct
MPAAKRVKLDGGDKKYSIGLDIGTNSVGWAVITDEYKVPSKKFKVLGNTDRHSIKKNLIGALLFDSGETAEATRLKRTARRRYTRRKNRICYLQEIFSNEMAKVDDSFFHRLEESFLVEEDKKHERHPIFGNIVDEVAYHEKYPTIYHLRKKLVDSTDKADLRLIYLALAHMIKFRGHFLIEGDLNPDNSDVDKLFIQLVQTYNQLFEENPINASGVDAKAILSARLSKSRRLENLIAQLPGEKKNGLFGNLIALSLGLTPNFKSNFDLAEDAKLQLSKDTYDDDLDNLLAQIGDQYADLFLAAKNLSDAILLSDILRVNTEITKAPLSASMIKRYDEHHQDLTLLKALVRQQLPEKYKEIFFDQSKNGYAGYIDGGASQEEFYKFIKPILEKMDGTEELLVKLNREDLLRKQRTFDNGSIPHQIHLGELHAILRRQEDFYPFLKDNREKIEKILTFRIPYYVGPLARGNSRFAWMTRKSEETITPWNFEEVVDKGASAQSFIERMTNFDKNLPNEKVLPKHSLLYEYFTVYNELTKVKYVTEGMRKPAFLSGEQKKAIVDLLFKTNRKVTVKQLKEDYFKKIECFDSVEISGVEDRFNASLGTYHDLLKIIKDKDFLDNEENEDILEDIVLTLTLFEDREMIEERLKTYAHLFDDKVMKQLKRRRYTGWGRLSRKLINGIRDKQSGKTILDFLKSDGFANRNFMQLIHDDSLTFKEDIQKAQVSGQGDSLHEHIANLAGSPAIKKGILQTVKVVDELVKVMGRHKPENIVIEMARENQTTQKGQKNSRERMKRIEEGIKELGSQILKEHPVENTQLQNEKLYLYYLQNGRDMYVDQELDINRLSDYDVDHIVPQSFLKDDSIDNKVLTRSDKARGKSDNVPSEEVVKKMKNYWRQLLNAKLITQRKFDNLTKAERGGLSELDKAGFIKRQLVETRQITKHVAQILDSRMNTKYDENDKLIREVKVITLKSKLVSDFRKDFQFYKVREINNYHHAHDAYLNAVVGTALIKKYPKLESEFVYGDYKVYDVRKMIAKSEQEIGKATAKYFFYSNIMNFFKTEITLANGEIRKRPLIETNGETGEIVWDKGRDFATVRKVLSMPQVNIVKKTEVQTGGFSKESILPKRNSDKLIARKKDWDPKKYGGFDSPTVAYSVLVVAKVEKGKSKKLKSVKELLGITIMERSSFEKNPIDFLEAKGYKEVKKDLIIKLPKYSLFELENGRKRMLASAGELQKGNELALPSKYVNFLYLASHYEKLKGSPEDNEQKQLFVEQHKHYLDEIIEQISEFSKRVILADANLDKVLSAYNKHRDKPIREQAENIIHLFTLTNLGAPAAFKYFDTTIDRKRYTSTKEVLDATLIHQSITGLYETRIDLSQLGGDGGEAAAKPAPGGGGGTLQLDDEYRLYSPLVKPDQNIQFWLEQFPQAWAETAGMGLAKQVPPQVIQLKASATPVSVRQYPLSKEAQEGIRPHVQRLIQQGILVPVQSPWNTPLLPVRKPGTNDYRPVQDLREVNKRVQDIHPTVPNPYNLLCALPPQRSWYTVLDLKDAFFCLRLHPTSQPLFAFEWRDPGTGRTGQLTWTRLPQGFKNSPTIFDEALHRDLANFRIQHPQVTLLQYVDDLLLAGATKQDCLEGTKALLLELSDLGYRASAKKAQICRREVTYLGYSLRDGQRWLTEARKKTVVQIPAPTTAKQVREFLGTAGFCRLWIPGFATLAAPLYPLTKEKGEFSWAPEHQKAFDAIKKALLSAPALALPDVTKPFTLYVDERKGVARGVLTQTLGPWRRPVAYLSKKLDPVASGWPVCLKAIAAVAILVKDADKLTLGQNITVIAPHALENIVRQPPDRWMTNARMTHYQSLLLTERVTFAPPAALNPATLLPEETDEPVTHDCHQLLIEETGVRKDLTDIPLTGEVLTWFTDGSSYVVEGKRMAGAAVVDGTRTIWASSLPEGTSAQKAELMALTQALRLAEGKSINIYTDSRYAFATAHVHGAIYKQRGLLTSAGREIKNKEEILSLLEALHLPKRLAIIHCPGHQKAKDPISRGNQMADRVAKQAAQGVNLLAGKRTADGSEFEKRTADGSEFESPKKKAKVE

SEQ ID NO: 7515 - protein, 2088 aa, synthetic construct; identical to SEQ ID NO: 7513

SEQ ID NO: 7516 - protein, 2176 aa, synthetic construct
MPAAKRVKLDGGDKKYSIGLDIGTNSVGWAVITDEYKVPSKKFKVLGNTDRHSIKKNLIGALLFDSGETAEATRLKRTARRRYTRRKNRICYLQEIFSNEMAKVDDSFFHRLEESFLVEEDKKHERHPIFGNIVDEVAYHEKYPTIYHLRKKLVDSTDKADLRLIYLALAHMIKFRGHFLIEGDLNPDNSDVDKLFIQLVQTYNQLFEENPINASGVDAKAILSARLSKSRRLENLIAQLPGEKKNGLFGNLIALSLGLTPNFKSNFDLAEDAKLQLSKDTYDDDLDNLLAQIGDQYADLFLAAKNLSDAILLSDILRVNTEITKAPLSASMIKRYDEHHQDLTLLKALVRQQLPEKYKEIFFDQSKNGYAGYIDGGASQEEFYKFIKPILEKMDGTEELLVKLNREDLLRKQRTFDNGSIPHQIHLGELHAILRRQEDFYPFLKDNREKIEKILTFRIPYYVGPLARGNSRFAWMTRKSEETITPWNFEEVVDKGASAQSFIERMTNFDKNLPNEKVLPKHSLLYEYFTVYNELTKVKYVTEGMRKPAFLSGEQKKAIVDLLFKTNRKVTVKQLKEDYFKKIECFDSVEISGVEDRFNASLGTYHDLLKIIKDKDFLDNEENEDILEDIVLTLTLFEDREMIEERLKTYAHLFDDKVMKQLKRRRYTGWGRLSRKLINGIRDKQSGKTILDFLKSDGFANRNFMQLIHDDSLTFKEDIQKAQVSGQGDSLHEHIANLAGSPAIKKGILQTVKVVDELVKVMGRHKPENIVIEMARENQTTQKGQKNSRERMKRIEEGIKELGSQILKEHPVENTQLQNEKLYLYYLQNGRDMYVDQELDINRLSDYDVDHIVPQSFLKDDSIDNKVLTRSDKARGKSDNVPSEEVVKKMKNYWRQLLNAKLITQRKFDNLTKAERGGLSELDKAGFIKRQLVETRQITKHVAQILDSRMNTKYDENDKLIREVKVITLKSKLVSDFRKDFQFYKVREINNYHHAHDAYLNAVVGTALIKKYPKLESEFVYGDYKVYDVRKMIAKSEQEIGKATAKYFFYSNIMNFFKTEITLANGEIRKRPLIETNGETGEIVWDKGRDFATVRKVLSMPQVNIVKKTEVQTGGFSKESILPKRNSDKLIARKKDWDPKKYGGFDSPTVAYSVLVVAKVEKGKSKKLKSVKELLGITIMERSSFEKNPIDFLEAKGYKEVKKDLIIKLPKYSLFELENGRKRMLASAGELQKGNELALPSKYVNFLYLASHYEKLKGSPEDNEQKQLFVEQHKHYLDEIIEQISEFSKRVILADANLDKVLSAYNKHRDKPIREQAENIIHLFTLTNLGAPAAFKYFDTTIDRKRYTSTKEVLDATLIHQSITGLYETRIDLSQLGGDGGEAAAKPAPGGGGGMDPLQLLQPLEAEIKGTKLKAHWNSGATITCVPEAFLEDERPIQTMLIKTIHGEKQQDVYYLTFKVQGRKVEAEVLASPYDYILLNPSDVPWLMKKPLQLTVLVPLHEYQERLLQQTALPKEQKELLQKLFLKYDALWQHWENQVGHRRIKPHNIATGTLAPRPQKQYPINPKAKPSIQIVIDDLLKQGVLIQQNSTMNTPVYPVPKPDGKWRMVLDYREVNKTIPLIAAQNQHSAGILSSIYRGKYKTTLDLTNGFWAHPITPESYWLTAFTWQGKQYCWTRLPQGFLNSPALFNADVVDLLKEIPNVQAYVDDIYISHDDPQEHLEQLEKIFSILLNAGYVVSLKKSEIAQREVEFLGFNITKEGRGLTDTFKQKLLNITPPKDLKQLQSILGKLNFARNFIPNYSELVKPLYTIVAPANGKFISWTEDNSNQLQHIISVLNQADNLEERNPETRLIIKVNSSPSAGYIRYYNEGSKRPIMYVNYIFSKAEAKFTQTEKLLTTMHKGLIKAMDLAMGQEILVYSPIVSMTKIQRTPLPERKALPVRWITWMTYLEDPRIQFHYDKSLPELQQIPNVTEDVIAKTKHPSEFAMVFYTDGSAIKHPDVNKSHSAGMGIAQVQFIPEYKIVHQWSIPLGDHTAQLAEIAAVEFACKKALKISGPVLIVTDSFYVAESANKELPYWKSNGFLNNKKKPLRHVSKWKSIAECLQLKPDIIIMHEKGHQQPMTTLHTEGNNLADKLATQGSYVVHAGKRTADGSEFEKRTADGSEFESPKKKAKVE

SEQ ID NO: 7517 - protein, 2176 aa, synthetic construct
MPAAKRVKLDGGDKKYSIGLDIGTNSVGWAVITDEYKVPSKKFKVLGNTDRHSIKKNLIGALLFDSGETAEATRLKRTARRRYTRRKNRICYLQEIFSNEMAKVDDSFFHRLEESFLVEEDKKHERHPIFGNIVDEVAYHEKYPTIYHLRKKLVDSTDKADLRLIYLALAHMIKFRGHFLIEGDLNPDNSDVDKLFIQLVQTYNQLFEENPINASGVDAKAILSARLSKSRRLENLIAQLPGEKKNGLFGNLIALSLGLTPNFKSNFDLAEDAKLQLSKDTYDDDLDNLLAQIGDQYADLFLAAKNLSDAILLSDILRVNTEITKAPLSASMIKRYDEHHQDLTLLKALVRQQLPEKYKEIFFDQSKNGYAGYIDGGASQEEFYKFIKPILEKMDGTEELLVKLNREDLLRKQRTFDNGSIPHQIHLGELHAILRRQEDFYPFLKDNREKIEKILTFRIPYYVGPLARGNSRFAWMTRKSEETITPWNFEEVVDKGASAQSFIERMTNFDKNLPNEKVLPKHSLLYEYFTVYNELTKVKYVTEGMRKPAFLSGEQKKAIVDLLFKTNRKVTVKQLKEDYFKKIECFDSVEISGVEDRFNASLGTYHDLLKIIKDKDFLDNEENEDILEDIVLTLTLFEDREMIEERLKTYAHLFDDKVMKQLKRRRYTGWGRLSRKLINGIRDKQSGKTILDFLKSDGFANRNFMQLIHDDSLTFKEDIQKAQVSGQGDSLHEHIANLAGSPAIKKGILQTVKVVDELVKVMGRHKPENIVIEMARENQTTQKGQKNSRERMKRIEEGIKELGSQILKEHPVENTQLQNEKLYLYYLQNGRDMYVDQELDINRLSDYDVDHIVPQSFLKDDSIDNKVLTRSDKARGKSDNVPSEEVVKKMKNYWRQLLNAKLITQRKFDNLTKAERGGLSELDKAGFIKRQLVETRQITKHVAQILDSRMNTKYDENDKLIREVKVITLKSKLVSDFRKDFQFYKVREINNYHHAHDAYLNAVVGTALIKKYPKLESEFVYGDYKVYDVRKMIAKSEQEIGKATAKYFFYSNIMNFFKTEITLANGEIRKRPLIETNGETGEIVWDKGRDFATVRKVLSMPQVNIVKKTEVQTGGFSKESILPKRNSDKLIARKKDWDPKKYGGFDSPTVAYSVLVVAKVEKGKSKKLKSVKELLGITIMERSSFEKNPIDFLEAKGYKEVKKDLIIKLPKYSLFELENGRKRMLASAGELQKGNELALPSKYVNFLYLASHYEKLKGSPEDNEQKQLFVEQHKHYLDEIIEQISEFSKRVILADANLDKVLSAYNKHRDKPIREQAENIIHLFTLTNLGAPAAFKYFDTTIDRKRYTSTKEVLDATLIHQSITGLYETRIDLSQLGGDGGEAAAKPAPGGGGGMDPLQLLQPLEAEIKGTKLKAHWNSGATITCVPQAFLEEEVPIKNIWIKTIHGEKEQPVYYLTFKIQGRKVEAEVISSPYDYILVSPSDIPWLMKKPLQLTTLVPLQEYEERLLKQTMLTGSYKEKLQSLFLKYDALWQHWENQVGHRRIKPHHIATGTVNPRPQKQYPINPKAKASIQTVINDLLKQGVLIQQNSIMNTPVYPVPKPDGKWRMVLDYREVNKTIPLIAAQNQHSAGILSSIFRGKYKTTLDLSNGFWAHSITPESYWLTAFTWLGQQYCWTRLPQGFLNSPALFTADVVDLLKEVPNVQVYVDDIYISHDDPREHLEQLEKVFSLLLNAGYVVSLKKSEIAQHEVEFLGFNITKEGRGLTETFKQKLLNITPPRDLKQLQSILGLLNFARNFIPNFSELVKPLYNIIATANGKYITWTTDNSQQLQNIISMLNSAENLEERNPEVRLIMKVNTSPSAGYIRFYNEFAKRPIMYLNYVYTKAEVKFTNTEKLLTTIHKGLIKALDLGMGQEILVYSPIVSMTKIQKTPLPERKALPIRWITWMSYLEDPRIQFHYDKTLPELQQVPTVTDDIIAKIKHPSEFSMVFYTDGSAIKHPNVNKSHNAGMGIAQVQFKPEFTVINTWSIPLGDHTAQLAEVAAVEFACKKALKIDGPVLIVTDSFYVAESVNKELPYWQSNGFFNNKKKPLKHVSKWKSIADCIQLKPDIIIIHEKGHQPTASTFHTEGNNLADKLATQGSYVVNAGKRTADGSEFEKRTADGSEFESPKKKAKVE

SEQ ID NO: 7518 - protein, 2087 aa, synthetic construct
MPAAKRVKLDGGDKKYSIGLDIGTNSVGWAVITDEYKVPSKKFKVLGNTDRHSIKKNLIGALLFDSGETAEATRLKRTARRRYTRRKNRICYLQEIFSNEMAKVDDSFFHRLEESFLVEEDKKHERHPIFGNIVDEVAYHEKYPTIYHLRKKLVDSTDKADLRLIYLALAHMIKFRGHFLIEGDLNPDNSDVDKLFIQLVQTYNQLFEENPINASGVDAKAILSARLSKSRRLENLIAQLPGEKKNGLFGNLIALSLGLTPNFKSNFDLAEDAKLQLSKDTYDDDLDNLLAQIGDQYADLFLAAKNLSDAILLSDILRVNTEITKAPLSASMIKRYDEHHQDLTLLKALVRQQLPEKYKEIFFDQSKNGYAGYIDGGASQEEFYKFIKPILEKMDGTEELLVKLNREDLLRKQRTFDNGSIPHQIHLGELHAILRRQEDFYPFLKDNREKIEKILTFRIPYYVGPLARGNSRFAWMTRKSEETITPWNFEEVVDKGASAQSFIERMTNFDKNLPNEKVLPKHSLLYEYFTVYNELTKVKYVTEGMRKPAFLSGEQKKAIVDLLFKTNRKVTVKQLKEDYFKKIECFDSVEISGVEDRFNASLGTYHDLLKIIKDKDFLDNEENEDILEDIVLTLTLFEDREMIEERLKTYAHLFDDKVMKQLKRRRYTGWGRLSRKLINGIRDKQSGKTILDFLKSDGFANRNFMQLIHDDSLTFKEDIQKAQVSGQGDSLHEHIANLAGSPAIKKGILQTVKVVDELVKVMGRHKPENIVIEMARENQTTQKGQKNSRERMKRIEEGIKELGSQILKEHPVENTQLQNEKLYLYYLQNGRDMYVDQELDINRLSDYDVDHIVPQSFLKDDSIDNKVLTRSDKARGKSDNVPSEEVVKKMKNYWRQLLNAKLITQRKFDNLTKAERGGLSELDKAGFIKRQLVETRQITKHVAQILDSRMNTKYDENDKLIREVKVITLKSKLVSDFRKDFQFYKVREINNYHHAHDAYLNAVVGTALIKKYPKLESEFVYGDYKVYDVRKMIAKSEQEIGKATAKYFFYSNIMNFFKTEITLANGEIRKRPLIETNGETGEIVWDKGRDFATVRKVLSMPQVNIVKKTEVQTGGFSKESILPKRNSDKLIARKKDWDPKKYGGFDSPTVAYSVLVVAKVEKGKSKKLKSVKELLGITIMERSSFEKNPIDFLEAKGYKEVKKDLIIKLPKYSLFELENGRKRMLASAGELQKGNELALPSKYVNFLYLASHYEKLKGSPEDNEQKQLFVEQHKHYLDEIIEQISEFSKRVILADANLDKVLSAYNKHRDKPIREQAENIIHLFTLTNLGAPAAFKYFDTTIDRKRYTSTKEVLDATLIHQSITGLYETRIDLSQLGGDGGEAAAKPAPGGGGGIPWLMKKPLQLTTLVPLQEYEERLLKQTMLTGSYKEKLQSLFLKYDALWQHWENQVGHRRIKPHHIATGTVNPRPQKQYPINPKAKASIQTVINDLLKQGVLIQQNSIMNTPVYPVPKPDGKWRMVLDYREVNKTIPLIAAQNQHSAGILSSIFRGKYKTTLDLSNGFWAHSITPESYWLTAFTWLGQQYCWTRLPQGFLNSPALFNADVVDLLKEVPNVQVYVDDIYISHDDPREHLEQLEKVFSLLLNAGYVVSLKKSEIAQHEVEFLGFNITKEGRGLTETFKQKLLNITPPRDLKQLQSILGLLNFARNFIPNFSELVKPLYNIIATAPGKYITWTTDNSQQLQNIISMLNSAENLEERNPEVRLIMKVNTSPSAGYIRFYNEFAKRPIMYLNYVYTKAEVKFTNTEKLLTTIHKGLIKALDLGMGQEILVYSPIVSMTKIQKTPLPERKALPIRWITWMSYLEDPRIQFHYDKTLPELQQVPTVTDDIIAKIKHPSEFSMVFYTDGSAIKHPNVNKSHNAGMGIAQVQFKPEFTVINTWSIPLGDHTAQLAEVAAVEFACKKALKIDGPVLIVTDSFYVAESVNKELPYWQSNGFFNNKKKPLKHVSKWKSIADCIQLKPDIIIIHEKGHQPTASTFHTEGNNLADKLATQGSYVVNAGKRTADGSEFEKRTADGSEFESPKKKAKVE

SEQ ID NO: 7519 - protein, 2176 aa, synthetic construct
MPAAKRVKLDGGDKKYSIGLDIGTNSVGWAVITDEYKVPSKKFKVLGNTDRHSIKKNLIGALLFDSGETAEATRLKRTARRRYTRRKNRICYLQEIFSNEMAKVDDSFFHRLEESFLVEEDKKHERHPIFGNIVDEVAYHEKYPTIYHLRKKLVDSTDKADLRLIYLALAHMIKFRGHFLIEGDLNPDNSDVDKLFIQLVQTYNQLFEENPINASGVDAKAILSARLSKSRRLENLIAQLPGEKKNGLFGNLIALSLGLTPNFKSNFDLAEDAKLQLSKDTYDDDLDNLLAQIGDQYADLFLAAKNLSDAILLSDILRVNTEITKAPLSASMIKRYDEHHQDLTLLKALVRQQLPEKYKEIFFDQSKNGYAGYIDGGASQEEFYKFIKPILEKMDGTEELLVKLNREDLLRKQRTFDNGSIPHQIHLGELHAILRRQEDFYPFLKDNREKIEKILTFRIPYYVGPLARGNSRFAWMTRKSEETITPWNFEEVVDKGASAQSFIERMTNFDKNLPNEKVLPKHSLLYEYFTVYNELTKVKYVTEGMRKPAFLSGEQKKAIVDLLFKTNRKVTVKQLKEDYFKKIECFDSVEISGVEDRFNASLGTYHDLLKIIKDKDFLDNEENEDILEDIVLTLTLFEDREMIEERLKTYAHLFDDKVMKQLKRRRYTGWGRLSRKLINGIRDKQSGKTILDFLKSDGFANRNFMQLIHDDSLTFKEDIQKAQVSGQGDSLHEHIANLAGSPAIKKGILQTVKVVDELVKVMGRHKPENIVIEMARENQTTQKGQKNSRERMKRIEEGIKELGSQILKEHPVENTQLQNEKLYLYYLQNGRDMYVDQELDINRLSDYDVDHIVPQSFLKDDSIDNKVLTRSDKARGKSDNVPSEEVVKKMKNYWRQLLNAKLITQRKFDNLTKAERGGLSELDKAGFIKRQLVETRQITKHVAQILDSRMNTKYDENDKLIREVKVITLKSKLVSDFRKDFQFYKVREINNYHHAHDAYLNAVVGTALIKKYPKLESEFVYGDYKVYDVRKMIAKSEQEIGKATAKYFFYSNIMNFFKTEITLANGEIRKRPLIETNGETGEIVWDKGRDFATVRKVLSMPQVNIVKKTEVQTGGFSKESILPKRNSDKLIARKKDWDPKKYGGFDSPTVAYSVLVVAKVEKGKSKKLKSVKELLGITIMERSSFEKNPIDFLEAKGYKEVKKDLIIKLPKYSLFELENGRKRMLASAGELQKGNELALPSKYVNFLYLASHYEKLKGSPEDNEQKQLFVEQHKHYLDEIIEQISEFSKRVILADANLDKVLSAYNKHRDKPIREQAENIIHLFTLTNLGAPAAFKYFDTTIDRKRYTSTKEVLDATLIHQSITGLYETRIDLSQLGGDGGEAAAKPAPGGGGGMDPLQLLQPLEAEIKGTKLKAHWNSGATITCVPQAFLEEEVPIKNIWIKTIHGEKEQPVYYLTFKIQGRKVEAEVISSPYDYILVSPSDIPWLMKKPLQLTTLVPLQEYEERLLKQTMLTGSYKEKLQSLFLKYDALWQHWENQVGHRRIKPHHIATGTVNPRPQKQYPINPKAKASIQTVINDLLKQGVLIQQNSIMNTPVYPVPKPDGKWRMVLDYREVNKTIPLIAAQNQHSAGILSSIFRGKYKTTLDLSNGFWAHSITPESYWLTAFTWLGQQYCWTRLPQGFLNSPALFNADVVDLLKEVPNVQVYVDDIYISHDDPREHLEQLEKVFSLLLNAGYVVSLKKSEIAQHEVEFLGFNITKEGRGLTETFKQKLLNITPPRDLKQLQSILGLLNFARNFIPNFSELVKPLYNIIATAPGKYITWTTDNSQQLQNIISMLNSAENLEERNPEVRLIMKVNTSPSAGYIRFYNEFAKRPIMYLNYVYTKAEVKFTNTEKLLTTIHKGLIKALDLGMGQEILVYSPIVSMTKIQKTPLPERKALPIRWITWMSYLEDPRIQFHYDKTLPELQQVPTVTDDIIAKIKHPSEFSMVFYTDGSAIKHPNVNKSHNAGMGIAQVQFKPEFTVINTWSIPLGDHTAQLAEVAAVEFACKKALKIDGPVLIVTDSFYVAESVNKELPYWQSNGFFNNKKKPLKHVSKWKSIADCIQLKPDIIIIHEKGHQPTASTFHTEGNNLADKLATQGSYVVNAGKRTADGSEFEKRTADGSEFESPKKKAKVE

SEQ ID NO: 7520 - protein, 2017 aa, synthetic construct
MPAAKRVKLDGGDKKYSIGLDIGTNSVGWAVITDEYKVPSKKFKVLGNTDRHSIKKNLIGALLFDSGETAEATRLKRTARRRYTRRKNRICYLQEIFSNEMAKVDDSFFHRLEESFLVEEDKKHERHPIFGNIVDEVAYHEKYPTIYHLRKKLVDSTDKADLRLIYLALAHMIKFRGHFLIEGDLNPDNSDVDKLFIQLVQTYNQLFEENPINASGVDAKAILSARLSKSRRLENLIAQLPGEKKNGLFGNLIALSLGLTPNFKSNFDLAEDAKLQLSKDTYDDDLDNLLAQIGDQYADLFLAAKNLSDAILLSDILRVNTEITKAPLSASMIKRYDEHHQDLTLLKALVRQQLPEKYKEIFFDQSKNGYAGYIDGGASQEEFYKFIKPILEKMDGTEELLVKLNREDLLRKQRTFDNGSIPHQIHLGELHAILRRQEDFYPFLKDNREKIEKILTFRIPYYVGPLARGNSRFAWMTRKSEETITPWNFEEVVDKGASAQSFIERMTNFDKNLPNEKVLPKHSLLYEYFTVYNELTKVKYVTEGMRKPAFLSGEQKKAIVDLLFKTNRKVTVKQLKEDYFKKIECFDSVEISGVEDRFNASLGTYHDLLKIIKDKDFLDNEENEDILEDIVLTLTLFEDREMIEERLKTYAHLFDDKVMKQLKRRRYTGWGRLSRKLINGIRDKQSGKTILDFLKSDGFANRNFMQLIHDDSLTFKEDIQKAQVSGQGDSLHEHIANLAGSPAIKKGILQTVKVVDELVKVMGRHKPENIVIEMARENQTTQKGQKNSRERMKRIEEGIKELGSQILKEHPVENTQLQNEKLYLYYLQNGRDMYVDQELDINRLSDYDVDHIVPQSFLKDDSIDNKVLTRSDKARGKSDNVPSEEVVKKMKNYWRQLLNAKLITQRKFDNLTKAERGGLSELDKAGFIKRQLVETRQITKHVAQILDSRMNTKYDENDKLIREVKVITLKSKLVSDFRKDFQFYKVREINNYHHAHDAYLNAVVGTALIKKYPKLESEFVYGDYKVYDVRKMIAKSEQEIGKATAKYFFYSNIMNFFKTEITLANGEIRKRPLIETNGETGEIVWDKGRDFATVRKVLSMPQVNIVKKTEVQTGGFSKESILPKRNSDKLIARKKDWDPKKYGGFDSPTVAYSVLVVAKVEKGKSKKLKSVKELLGITIMERSSFEKNPIDFLEAKGYKEVKKDLIIKLPKYSLFELENGRKRMLASAGELQKGNELALPSKYVNFLYLASHYEKLKGSPEDNEQKQLFVEQHKHYLDEIIEQISEFSKRVILADANLDKVLSAYNKHRDKPIREQAENIIHLFTLTNLGAPAAFKYFDTTIDRKRYTSTKEVLDATLIHQSITGLYETRIDLSQLGGDGGEAAAKPAPGGGGGPRSRAIDIPVPHADKISWKITDPVWVDQWPLTYEKTLAAIALVQEQLAAGHIEPTNSPWNTPIFIIKKKSGSWRLLQDLRAVNKVMVPMGALQPGLPSPVAPPLNYHKIVIDLKDCFFTIPLHPEDRPYFAFSVPQINFQSPMPRYQWKVLPQGMANSPTLCQKFVAAAIAPVRSQWPEAYILHYMDDILLACDSAEAAKACYAHIISCLTSYGLKIAPDKVQVSEPFSYLGFELHHQQVFTPRVCLKTDHLKTLNDFQKLLGDIQWLRPYLKLPTSALVPLNNILKPDPNPLSVRALTPEAKQSLALINKAIQNQSVQQISYNLPLVLLLLPTPHTPTAVFWQPNGTDPTKNGSPLLWLHLPASPSKVLLTYPSLLAMLIIKGRYTGRQLFGRDPHSIIIPYTQDQLTWLLQTSDEWAIALSSFTGDIDNHYPSDPVIQFAKLHQFIFPKITKCAPIPQATLVFTDGSSNGIAAYVIDNQPISIKSPYLSAQLVELYAILQVFTVLAHQPFNLYTDSAYIAQSVPLLETVPFIKSSTNATPLFSKLQQLILNRQHPFFIGHLRAHLNLPGPLAEGNALADAATQIFPIISDAGKRTADGSEFEKRTADGSEFESPKKKAKVE

SEQ ID NO: 7521 - protein, 2094 aa, synthetic construct
MPAAKRVKLDGGDKKYSIGLDIGTNSVGWAVITDEYKVPSKKFKVLGNTDRHSIKKNLIGALLFDSGETAEATRLKRTARRRYTRRKNRICYLQEIFSNEMAKVDDSFFHRLEESFLVEEDKKHERHPIFGNIVDEVAYHEKYPTIYHLRKKLVDSTDKADLRLIYLALAHMIKFRGHFLIEGDLNPDNSDVDKLFIQLVQTYNQLFEENPINASGVDAKAILSARLSKSRRLENLIAQLPGEKKNGLFGNLIALSLGLTPNFKSNFDLAEDAKLQLSKDTYDDDLDNLLAQIGDQYADLFLAAKNLSDAILLSDILRVNTEITKAPLSASMIKRYDEHHQDLTLLKALVRQQLPEKYKEIFFDQSKNGYAGYIDGGASQEEFYKFIKPILEKMDGTEELLVKLNREDLLRKQRTFDNGSIPHQIHLGELHAILRRQEDFYPFLKDNREKIEKILTFRIPYYVGPLARGNSRFAWMTRKSEETITPWNFEEVVDKGASAQSFIERMTNFDKNLPNEKVLPKHSLLYEYFTVYNELTKVKYVTEGMRKPAFLSGEQKKAIVDLLFKTNRKVTVKQLKEDYFKKIECFDSVEISGVEDRFNASLGTYHDLLKIIKDKDFLDNEENEDILEDIVLTLTLFEDREMIEERLKTYAHLFDDKVMKQLKRRRYTGWGRLSRKLINGIRDKQSGKTILDFLKSDGFANRNFMQLIHDDSLTFKEDIQKAQVSGQGDSLHEHIANLAGSPAIKKGILQTVKVVDELVKVMGRHKPENIVIEMARENQTTQKGQKNSRERMKRIEEGIKELGSQILKEHPVENTQLQNEKLYLYYLQNGRDMYVDQELDINRLSDYDVDHIVPQSFLKDDSIDNKVLTRSDKARGKSDNVPSEEVVKKMKNYWRQLLNAKLITQRKFDNLTKAERGGLSELDKAGFIKRQLVETRQITKHVAQILDSRMNTKYDENDKLIREVKVITLKSKLVSDFRKDFQFYKVREINNYHHAHDAYLNAVVGTALIKKYPKLESEFVYGDYKVYDVRKMIAKSEQEIGKATAKYFFYSNIMNFFKTEITLANGEIRKRPLIETNGETGEIVWDKGRDFATVRKVLSMPQVNIVKKTEVQTGGFSKESILPKRNSDKLIARKKDWDPKKYGGFDSPTVAYSVLVVAKVEKGKSKKLKSVKELLGITIMERSSFEKNPIDFLEAKGYKEVKKDLIIKLPKYSLFELENGRKRMLASAGELQKGNELALPSKYVNFLYLASHYEKLKGSPEDNEQKQLFVEQHKHYLDEIIEQISEFSKRVILADANLDKVLSAYNKHRDKPIREQAENIIHLFTLTNLGAPAAFKYFDTTIDRKRYTSTKEVLDATLIHQSITGLYETRIDLSQLGGDGGEAAAKPAPGGGGGVLNLEEEYRLHEKPVPSSIDPSWLQLFPTVWAERAGMGLANQVPPVVVELRSGASPVAVRQYPMSKEAREGIRPHIQRFLDLGVLVPCQSPWNTPLLPVKKPGTNDYRPVQDLREINKRVQDIHPTVPNPYNLLSSLPPSHTWYSVLDLKDAFFCLKLHPNSQPLFAFEWRDPEKGNTGQLTWTRLPQGFKNSPTLFNEALHRDLAPFRALNPQVVLLQYVDDLLVAAPTYRDCKEGTQKLLQELSKLGYRVSAKKAQLCQKEVTYLGYLLKEGKRWLTPARKATVMKIPPPTTPRQVREFLGKAGFCRLFIPGFASLAAPLYPLTKPSIPFIWTEEHQKAFDRIKEALLSAPALALPDLTKPFTLYVDERAGVARGVLTQTLGPWRRPVAYLSKKLDPVASGWPTCLKAVAAVALLLKDADKLTLGQNVTVIASHSLESIVRQPPDRWMTNARMTHYQSLLLNERVSFAPPAVLNPATLLPVESEATPVHRCSEILAEETGTRRDLKDQPLPGVPAWYTDGSSFIAEGKRRAGAAIVDGKRTVWASSLPEGTSAQKAELVALTQALRLAEGKDINIYTDSRYAFATAHIHGAIYKQRGWLTSAGKDIKNKEEILALLEAIHLPKRVAIIHCPGHQKGNDPVATGNRRADEAAKQAALSTRVLAETTKPAGKRTADGSEFEKRTADGSEFESPKKKAKVE

SEQ ID NO: 7522 - protein, 2096 aa, synthetic construct
MPAAKRVKLDGGDKKYSIGLDIGTNSVGWAVITDEYKVPSKKFKVLGNTDRHSIKKNLIGALLFDSGETAEATRLKRTARRRYTRRKNRICYLQEIFSNEMAKVDDSFFHRLEESFLVEEDKKHERHPIFGNIVDEVAYHEKYPTIYHLRKKLVDSTDKADLRLIYLALAHMIKFRGHFLIEGDLNPDNSDVDKLFIQLVQTYNQLFEENPINASGVDAKAILSARLSKSRRLENLIAQLPGEKKNGLFGNLIALSLGLTPNFKSNFDLAEDAKLQLSKDTYDDDLDNLLAQIGDQYADLFLAAKNLSDAILLSDILRVNTEITKAPLSASMIKRYDEHHQDLTLLKALVRQQLPEKYKEIFFDQSKNGYAGYIDGGASQEEFYKFIKPILEKMDGTEELLVKLNREDLLRKQRTFDNGSIPHQIHLGELHAILRRQEDFYPFLKDNREKIEKILTFRIPYYVGPLARGNSRFAWMTRKSEETITPWNFEEVVDKGASAQSFIERMTNFDKNLPNEKVLPKHSLLYEYFTVYNELTKVKYVTEGMRKPAFLSGEQKKAIVDLLFKTNRKVTVKQLKEDYFKKIECFDSVEISGVEDRFNASLGTYHDLLKIIKDKDFLDNEENEDILEDIVLTLTLFEDREMIEERLKTYAHLFDDKVMKQLKRRRYTGWGRLSRKLINGIRDKQSGKTILDFLKSDGFANRNFMQLIHDDSLTFKEDIQKAQVSGQGDSLHEHIANLAGSPAIKKGILQTVKVVDELVKVMGRHKPENIVIEMARENQTTQKGQKNSRERMKRIEEGIKELGSQILKEHPVENTQLQNEKLYLYYLQNGRDMYVDQELDINRLSDYDVDHIVPQSFLKDDSIDNKVLTRSDKARGKSDNVPSEEVVKKMKNYWRQLLNAKLITQRKFDNLTKAERGGLSELDKAGFIKRQLVETRQITKHVAQILDSRMNTKYDENDKLIREVKVITLKSKLVSDFRKDFQFYKVREINNYHHAHDAYLNAVVGTALIKKYPKLESEFVYGDYKVYDVRKMIAKSEQEIGKATAKYFFYSNIMNFFKTEITLANGEIRKRPLIETNGETGEIVWDKGRDFATVRKVLSMPQVNIVKKTEVQTGGFSKESILPKRNSDKLIARKKDWDPKKYGGFDSPTVAYSVLVVAKVEKGKSKKLKSVKELLGITIMERSSFEKNPIDFLEAKGYKEVKKDLIIKLPKYSLFELENGRKRMLASAGELQKGNELALPSKYVNFLYLASHYEKLKGSPEDNEQKQLFVEQHKHYLDEIIEQISEFSKRVILADANLDKVLSAYNKHRDKPIREQAENIIHLFTLTNLGAPAAFKYFDTTIDRKRYTSTKEVLDATLIHQSITGLYETRIDLSQLGGDGGEAAAKPAPGGGGGTLNIEDEYRLHETSKEPDVPLGSTWLSDFPQAWAETGGMGLAVRQAPLIIPLKATSTPVSIKQYPMSQEARLGIKPHIQRLLDQGILVPCQSPWNTPLLPVKKPGTNDYRPVQDLREVNKRVEDIHPTVPNPYNLLSGLPPSHQWYTVLDLKDAFFCLRLHPTSQPLFAFEWRDPEMGISGQLTWTRLPQGFKNSPTLFNEALHRDLADFRIQHPDLILLQYVDDLLLAATSEQDCQRGTRALLQTLGNLGYRASAKKAQICQKQVKYLGYLLKEGQRWLTEARKETVMGQPTPKTPRQLREFLGTAGFCRLWIPGFAEMAAPLYPLTKPGTLFNWGPDQQKAYQEIKQALLTAPALGLPDLTKPFELFVDEKQGYAKGVLTQKLGPWRRPVAYLSKKLDPVAAGWPPCLRMVAAIAVLTKDAGKLTMGQPLVILAPHAVEALVKQPPDRWLSNARMTHYQAMLLDTDRVQFGPVVALNPATLLPLPEKEAPHDCLEILAETHGTRPDLTDQPIPDADYTWYTDGSSFLQEGQRRAGAAVTTETEVIWARALPAGTSAQRAELIALTQALKMAEGKKLNVYTDSRYAFATAHVHGEIYRRRGWLTSEGREIKNKNEILALLKALFLPKRLSIIHCPGHQKGNSAEARGNRMADQAAREAAMKAVLETSTLLAGKRTADGSEFEKRTADGSEFESPKKKAKVE

SEQ ID NO: 7523 - protein, 2096 aa, synthetic construct
MPAAKRVKLDGGDKKYSIGLDIGTNSVGWAVITDEYKVPSKKFKVLGNTDRHSIKKNLIGALLFDSGETAEATRLKRTARRRYTRRKNRICYLQEIFSNEMAKVDDSFFHRLEESFLVEEDKKHERHPIFGNIVDEVAYHEKYPTIYHLRKKLVDSTDKADLRLIYLALAHMIKFRGHFLIEGDLNPDNSDVDKLFIQLVQTYNQLFEENPINASGVDAKAILSARLSKSRRLENLIAQLPGEKKNGLFGNLIALSLGLTPNFKSNFDLAEDAKLQLSKDTYDDDLDNLLAQIGDQYADLFLAAKNLSDAILLSDILRVNTEITKAPLSASMIKRYDEHHQDLTLLKALVRQQLPEKYKEIFFDQSKNGYAGYIDGGASQEEFYKFIKPILEKMDGTEELLVKLNREDLLRKQRTFDNGSIPHQIHLGELHAILRRQEDFYPFLKDNREKIEKILTFRIPYYVGPLARGNSRFAWMTRKSEETITPWNFEEVVDKGASAQSFIERMTNFDKNLPNEKVLPKHSLLYEYFTVYNELTKVKYVTEGMRKPAFLSGEQKKAIVDLLFKTNRKVTVKQLKEDYFKKIECFDSVEISGVEDRFNASLGTYHDLLKIIKDKDFLDNEENEDILEDIVLTLTLFEDREMIEERLKTYAHLFDDKVMKQLKRRRYTGWGRLSRKLINGIRDKQSGKTILDFLKSDGFANRNFMQLIHDDSLTFKEDIQKAQVSGQGDSLHEHIANLAGSPAIKKGILQTVKVVDELVKVMGRHKPENIVIEMARENQTTQKGQKNSRERMKRIEEGIKELGSQILKEHPVENTQLQNEKLYLYYLQNGRDMYVDQELDINRLSDYDVDHIVPQSFLKDDSIDNKVLTRSDKARGKSDNVPSEEVVKKMKNYWRQLLNAKLITQRKFDNLTKAERGGLSELDKAGFIKRQLVETRQITKHVAQILDSRMNTKYDENDKLIREVKVITLKSKLVSDFRKDFQFYKVREINNYHHAHDAYLNAVVGTALIKKYPKLESEFVYGDYKVYDVRKMIAKSEQEIGKATAKYFFYSNIMNFFKTEITLANGEIRKRPLIETNGETGEIVWDKGRDFATVRKVLSMPQVNIVKKTEVQTGGFSKESILPKRNSDKLIARKKDWDPKKYGGFDSPTVAYSVLVVAKVEKGKSKKLKSVKELLGITIMERSSFEKNPIDFLEAKGYKEVKKDLIIKLPKYSLFELENGRKRMLASAGELQKGNELALPSKYVNFLYLASHYEKLKGSPEDNEQKQLFVEQHKHYLDEIIEQISEFSKRVILADANLDKVLSAYNKHRDKPIREQAENIIHLFTLTNLGAPAAFKYFDTTIDRKRYTSTKEVLDATLIHQSITGLYETRIDLSQLGGDGGEAAAKPAPGGGGGTLNIEDEYRLHETSKEPDVPLGSTWLSDFPQAWAETGGMGLAVRQAPLIIPLKATSTPVSIKQYPMSQEARLGIKPHIQRLLDQGILVPCQSPWNTPLLPVKKPGTNDYRPVQDLREVNKRVEDIHPTVPNPYNLLSGLPPSHQWYTVLDLKDAFFCLRLHPTSQPLFAFEWRDPEMGISGQLTWTRLPQGFKNSPTLFNEALHRDLADFRIQHPDLILLQYVDDLLLAATSEQDCQRGTRALLQTLGNLGYRASAKKAQICQKQVKYLGYLLKEGQRWLTEARKETVMGQPTPKTPRQLREFLGKAGFCRLFIPGFAEMAAPLYPLTKPGTLFNWGPDQQKAYQEIKQALLTAPALGLPDLTKPFELFVDEKQGYAKGVLTQKLGPWRRPVAYLSKKLDPVAAGWPPCLRMVAAIAVLTKDAGKLTMGQPLVILAPHAVEALVKQPPDRWLSNARMTHYQAMLLDTDRVQFGPVVALNPATLLPLPEKEAPHDCLEILAETHGTRPDLTDQPIPDADYTWYTDGSSFLQEGQRRAGAAVTTETEVIWARALPAGTSAQRAELIALTQALKMAEGKKLNVYTDSRYAFATAHVHGEIYRRRGWLTSEGREIKNKNEILALLKALFLPKRLSIIHCPGHQKGNSAEARGNRMADQAAREAAMKAVLETSTLLAGKRTADGSEFEKRTADGSEFESPKKKAKVE

SEQ ID NO: 7524 - protein, 2098 aa, synthetic construct
MPAAKRVKLDGGDKKYSIGLDIGTNSVGWAVITDEYKVPSKKFKVLGNTDRHSIKKNLIGALLFDSGETAEATRLKRTARRRYTRRKNRICYLQEIFSNEMAKVDDSFFHRLEESFLVEEDKKHERHPIFGNIVDEVAYHEKYPTIYHLRKKLVDSTDKADLRLIYLALAHMIKFRGHFLIEGDLNPDNSDVDKLFIQLVQTYNQLFEENPINASGVDAKAILSARLSKSRRLENLIAQLPGEKKNGLFGNLIALSLGLTPNFKSNFDLAEDAKLQLSKDTYDDDLDNLLAQIGDQYADLFLAAKNLSDAILLSDILRVNTEITKAPLSASMIKRYDEHHQDLTLLKALVRQQLPEKYKEIFFDQSKNGYAGYIDGGASQEEFYKFIKPILEKMDGTEELLVKLNREDLLRKQRTFDNGSIPHQIHLGELHAILRRQEDFYPFLKDNREKIEKILTFRIPYYVGPLARGNSRFAWMTRKSEETITPWNFEEVVDKGASAQSFIERMTNFDKNLPNEKVLPKHSLLYEYFTVYNELTKVKYVTEGMRKPAFLSGEQKKAIVDLLFKTNRKVTVKQLKEDYFKKIECFDSVEISGVEDRFNASLGTYHDLLKIIKDKDFLDNEENEDILEDIVLTLTLFEDREMIEERLKTYAHLFDDKVMKQLKRRRYTGWGRLSRKLINGIRDKQSGKTILDFLKSDGFANRNFMQLIHDDSLTFKEDIQKAQVSGQGDSLHEHIANLAGSPAIKKGILQTVKVVDELVKVMGRHKPENIVIEMARENQTTQKGQKNSRERMKRIEEGIKELGSQILKEHPVENTQLQNEKLYLYYLQNGRDMYVDQELDINRLSDYDVDHIVPQSFLKDDSIDNKVLTRSDKARGKSDNVPSEEVVKKMKNYWRQLLNAKLITQRKFDNLTKAERGGLSELDKAGFIKRQLVETRQITKHVAQILDSRMNTKYDENDKLIREVKVITLKSKLVSDFRKDFQFYKVREINNYHHAHDAYLNAVVGTALIKKYPKLESEFVYGDYKVYDVRKMIAKSEQEIGKATAKYFFYSNIMNFFKTEITLANGEIRKRPLIETNGETGEIVWDKGRDFATVRKVLSMPQVNIVKKTEVQTGGFSKESILPKRNSDKLIARKKDWDPKKYGGFDSPTVAYSVLVVAKVEKGKSKKLKSVKELLGITIMERSSFEKNPIDFLEAKGYKEVKKDLIIKLPKYSLFELENGRKRMLASAGELQKGNELALPSKYVNFLYLASHYEKLKGSPEDNEQKQLFVEQHKHYLDEIIEQISEFSKRVILADANLDKVLSAYNKHRDKPIREQAENIIHLFTLTNLGAPAAFKYFDTTIDRKRYTSTKEVLDATLIHQSITGLYETRIDLSQLGGDGGPAPGGGEAAAKGGTAPLEEEYRLFLEAPIQNVTLLEQWKREIPKVWAEINPPGLASTQAPIHVQLLSTALPVRVRQYPITLEAKRSLRETIRKFRAAGILRPVHSPWNTPLLPVRKSGTSEYRMVQDLREVNKRVETIHPTVPNPYTLLSLLPPDRIWYSVLDLKDAFFCIPLAPESQLIFAFEWADAEEGESGQLTWTRLPQGFKNSPTLFDEALNRDLQGFRLDHPSVSLLQYVDDLLIAADTQAACLSATRDLLMTLAELGYRVSGKKAQLCQEEVTYLGFKIHKGSRSLSNSRTQAILQIPVPKTKRQVREFLGTIGYCRLWIPGFAELAQPLYAATRGGNDPLVWGEKEEEAFQSLKLALTQPPALALPSLDKPFQLFVEETSGAAKGVLTQALGPWKRPVAYLSKRLDPVAAGWPRCLRAIAAAALLTREASKLTFGQDIEITSSHNLESLLRSPPDKWLTNARITQYQVLLLDPPRVRFKQTAALNPATLLPETDDTLPIHHCLDTLDSLTSTRPDLTDQPLAQAEATLFTDGSSYIRDGKRYAGAAVVTLDSVIWAEPLPIGTSAQKAELIALTKALEWSKDKSVNIYTDSRYAFATLHVHGMIYRERGLLTAGGKAIKNAPEILALLTAVWLPKRVAVMHCKGHQKDDAPTSTGNRRADEVAREVAIRPLSTQATISAGKRTADGSEFEKRTADGSEFESPKKKAKVE

SEQ ID NO: 7525 - protein, 2098 aa, synthetic construct
MPAAKRVKLDGGDKKYSIGLDIGTNSVGWAVITDEYKVPSKKFKVLGNTDRHSIKKNLIGALLFDSGETAEATRLKRTARRRYTRRKNRICYLQEIFSNEMAKVDDSFFHRLEESFLVEEDKKHERHPIFGNIVDEVAYHEKYPTIYHLRKKLVDSTDKADLRLIYLALAHMIKFRGHFLIEGDLNPDNSDVDKLFIQLVQTYNQLFEENPINASGVDAKAILSARLSKSRRLENLIAQLPGEKKNGLFGNLIALSLGLTPNFKSNFDLAEDAKLQLSKDTYDDDLDNLLAQIGDQYADLFLAAKNLSDAILLSDILRVNTEITKAPLSASMIKRYDEHHQDLTLLKALVRQQLPEKYKEIFFDQSKNGYAGYIDGGASQEEFYKFIKPILEKMDGTEELLVKLNREDLLRKQRTFDNGSIPHQIHLGELHAILRRQEDFYPFLKDNREKIEKILTFRIPYYVGPLARGNSRFAWMTRKSEETITPWNFEEVVDKGASAQSFIERMTNFDKNLPNEKVLPKHSLLYEYFTVYNELTKVKYVTEGMRKPAFLSGEQKKAIVDLLFKTNRKVTVKQLKEDYFKKIECFDSVEISGVEDRFNASLGTYHDLLKIIKDKDFLDNEENEDILEDIVLTLTLFEDREMIEERLKTYAHLFDDKVMKQLKRRRYTGWGRLSRKLINGIRDKQSGKTILDFLKSDGFANRNFMQLIHDDSLTFKEDIQKAQVSGQGDSLHEHIANLAGSPAIKKGILQTVKVVDELVKVMGRHKPENIVIEMARENQTTQKGQKNSRERMKRIEEGIKELGSQILKEHPVENTQLQNEKLYLYYLQNGRDMYVDQELDINRLSDYDVDHIVPQSFLKDDSIDNKVLTRSDKARGKSDNVPSEEVVKKMKNYWRQLLNAKLITQRKFDNLTKAERGGLSELDKAGFIKRQLVETRQITKHVAQILDSRMNTKYDENDKLIREVKVITLKSKLVSDFRKDFQFYKVREINNYHHAHDAYLNAVVGTALIKKYPKLESEFVYGDYKVYDVRKMIAKSEQEIGKATAKYFFYSNIMNFFKTEITLANGEIRKRPLIETNGETGEIVWDKGRDFATVRKVLSMPQVNIVKKTEVQTGGFSKESILPKRNSDKLIARKKDWDPKKYGGFDSPTVAYSVLVVAKVEKGKSKKLKSVKELLGITIMERSSFEKNPIDFLEAKGYKEVKKDLIIKLPKYSLFELENGRKRMLASAGELQKGNELALPSKYVNFLYLASHYEKLKGSPEDNEQKQLFVEQHKHYLDEIIEQISEFSKRVILADANLDKVLSAYNKHRDKPIREQAENIIHLFTLTNLGAPAAFKYFDTTIDRKRYTSTKEVLDATLIHQSITGLYETRIDLSQLGGDGGPAPGGGEAAAKGGTAPLEEEYRLFLEAPIQNVTLLEQWKREIPKVWAEINPPGLASTQAPIHVQLLSTALPVRVRQYPITLEAKRSLRETIRKFRAAGILRPVHSPWNTPLLPVRKSGTSEYRMVQDLREVNKRVETIHPTVPNPYTLLSLLPPDRIWYSVLDLKDAFFCIPLAPESQLIFAFEWADAEEGESGQLTWTRLPQGFKNSPTLFNEALNRDLQGFRLDHPSVSLLQYVDDLLIAADTQAACLSATRDLLMTLAELGYRVSGKKAQLCQEEVTYLGFKIHKGSRSLSNSRTQAILQIPVPKTKRQVREFLGTIGYCRLWIPGFAELAQPLYAATRPGNDPLVWGEKEEEAFQSLKLALTQPPALALPSLDKPFQLFVEETSGAAKGVLTQALGPWKRPVAYLSKRLDPVAAGWPRCLRAIAAAALLTREASKLTFGQDIEITSSHNLESLLRSPPDKWLTNARITQYQVLLLDPPRVRFKQTAALNPATLLPETDDTLPIHHCLDTLDSLTSTRPDLTDQPLAQAEATLFTDGSSYIRDGKRYAGAAVVTLDSVIWAEPLPIGTSAQKAELIALTKALEWSKDKSVNIYTDSRYAFATLHVHGMIYRERGWLTAGGKAIKNAPEILALLTAVWLPKRVAVMHCKGHQKDDAPTSTGNRRADEVAREVAIRPLSTQATISAGKRTADGSEFEKRTADGSEFESPKKKAKVE

SEQ ID NO: 7526 - protein, 2098 aa, synthetic construct
MPAAKRVKLDGGDKKYSIGLDIGTNSVGWAVITDEYKVPSKKFKVLGNTDRHSIKKNLIGALLFDSGETAEATRLKRTARRRYTRRKNRICYLQEIFSNEMAKVDDSFFHRLEESFLVEEDKKHERHPIFGNIVDEVAYHEKYPTIYHLRKKLVDSTDKADLRLIYLALAHMIKFRGHFLIEGDLNPDNSDVDKLFIQLVQTYNQLFEENPINASGVDAKAILSARLSKSRRLENLIAQLPGEKKNGLFGNLIALSLGLTPNFKSNFDLAEDAKLQLSKDTYDDDLDNLLAQIGDQYADLFLAAKNLSDAILLSDILRVNTEITKAPLSASMIKRYDEHHQDLTLLKALVRQQLPEKYKEIFFDQSKNGYAGYIDGGASQEEFYKFIKPILEKMDGTEELLVKLNREDLLRKQRTFDNGSIPHQIHLGELHAILRRQEDFYPFLKDNREKIEKILTFRIPYYVGPLARGNSRFAWMTRKSEETITPWNFEEVVDKGASAQSFIERMTNFDKNLPNEKVLPKHSLLYEYFTVYNELTKVKYVTEGMRKPAFLSGEQKKAIVDLLFKTNRKVTVKQLKEDYFKKIECFDSVEISGVEDRFNASLGTYHDLLKIIKDKDFLDNEENEDILEDIVLTLTLFEDREMIEERLKTYAHLFDDKVMKQLKRRRYTGWGRLSRKLINGIRDKQSGKTILDFLKSDGFANRNFMQLIHDDSLTFKEDIQKAQVSGQGDSLHEHIANLAGSPAIKKGILQTVKVVDELVKVMGRHKPENIVIEMARENQTTQKGQKNSRERMKRIEEGIKELGSQILKEHPVENTQLQNEKLYLYYLQNGRDMYVDQELDINRLSDYDVDHIVPQSFLKDDSIDNKVLTRSDKARGKSDNVPSEEVVKKMKNYWRQLLNAKLITQRKFDNLTKAERGGLSELDKAGFIKRQLVETRQITKHVAQILDSRMNTKYDENDKLIREVKVITLKSKLVSDFRKDFQFYKVREINNYHHAHDAYLNAVVGTALIKKYPKLESEFVYGDYKVYDVRKMIAKSEQEIGKATAKYFFYSNIMNFFKTEITLANGEIRKRPLIETNGETGEIVWDKGRDFATVRKVLSMPQVNIVKKTEVQTGGFSKESILPKRNSDKLIARKKDWDPKKYGGFDSPTVAYSVLVVAKVEKGKSKKLKSVKELLGITIMERSSFEKNPIDFLEAKGYKEVKKDLIIKLPKYSLFELENGRKRMLASAGELQKGNELALPSKYVNFLYLASHYEKLKGSPEDNEQKQLFVEQHKHYLDEIIEQISEFSKRVILADANLDKVLSAYNKHRDKPIREQAENIIHLFTLTNLGAPAAFKYFDTTIDRKRYTSTKEVLDATLIHQSITGLYETRIDLSQLGGDGGPAPGGGEAAAKGGTAPLEEEYRLFLEAPIQNVTLLEQWKREIPKVWAEINPPGLASTQAPIHVQLLSTALPVRVRQYPITLEAKRSLRETIRKFRAAGILRPVHSPWNTPLLPVRKSGTSEYRMVQDLREVNKRVETIHPTVPNPYTLLSLLPPDRIWYSVLDLKDAFFCIPLAPESQLIFAFEWADAEEGESGQLTWTRLPQGFKNSPTLFNEALNRDLQGFRLDHPSVSLLQYVDDLLIAADTQAACLSATRDLLMTLAELGYRVSGKKAQLCQEEVTYLGFKIHKGSRSLSNSRTQAILQIPVPKTKRQVREFLGKIGYCRLFIPGFAELAQPLYAATRPGNDPLVWGEKEEEAFQSLKLALTQPPALALPSLDKPFQLFVEETSGAAKGVLTQALGPWKRPVAYLSKRLDPVAAGWPRCLRAIAAAALLTREASKLTFGQDIEITSSHNLESLLRSPPDKWLTNARITQYQVLLLDPPRVRFKQTAALNPATLLPETDDTLPIHHCLDTLDSLTSTRPDLTDQPLAQAEATLFTDGSSYIRDGKRYAGAAVVTLDSVIWAEPLPIGTSAQKAELIALTKALEWSKDKSVNIYTDSRYAFATLHVHGMIYRERGWLTAGGKAIKNAPEILALLTAVWLPKRVAVMHCKGHQKDDAPTSTGNRRADEVAREVAIRPLSTQATISAGKRTADGSEFEKRTADGSEFESPKKKAKVE

SEQ ID NO: 7527 - protein, 2173 aa, synthetic construct
MPAAKRVKLDGGDKKYSIGLDIGTNSVGWAVITDEYKVPSKKFKVLGNTDRHSIKKNLIGALLFDSGETAEATRLKRTARRRYTRRKNRICYLQEIFSNEMAKVDDSFFHRLEESFLVEEDKKHERHPIFGNIVDEVAYHEKYPTIYHLRKKLVDSTDKADLRLIYLALAHMIKFRGHFLIEGDLNPDNSDVDKLFIQLVQTYNQLFEENPINASGVDAKAILSARLSKSRRLENLIAQLPGEKKNGLFGNLIALSLGLTPNFKSNFDLAEDAKLQLSKDTYDDDLDNLLAQIGDQYADLFLAAKNLSDAILLSDILRVNTEITKAPLSASMIKRYDEHHQDLTLLKALVRQQLPEKYKEIFFDQSKNGYAGYIDGGASQEEFYKFIKPILEKMDGTEELLVKLNREDLLRKQRTFDNGSIPHQIHLGELHAILRRQEDFYPFLKDNREKIEKILTFRIPYYVGPLARGNSRFAWMTRKSEETITPWNFEEVVDKGASAQSFIERMTNFDKNLPNEKVLPKHSLLYEYFTVYNELTKVKYVTEGMRKPAFLSGEQKKAIVDLLFKTNRKVTVKQLKEDYFKKIECFDSVEISGVEDRFNASLGTYHDLLKIIKDKDFLDNEENEDILEDIVLTLTLFEDREMIEERLKTYAHLFDDKVMKQLKRRRYTGWGRLSRKLINGIRDKQSGKTILDFLKSDGFANRNFMQLIHDDSLTFKEDIQKAQVSGQGDSLHEHIANLAGSPAIKKGILQTVKVVDELVKVMGRHKPENIVIEMARENQTTQKGQKNSRERMKRIEEGIKELGSQILKEHPVENTQLQNEKLYLYYLQNGRDMYVDQELDINRLSDYDVDHIVPQSFLKDDSIDNKVLTRSDKARGKSDNVPSEEVVKKMKNYWRQLLNAKLITQRKFDNLTKAERGGLSELDKAGFIKRQLVETRQITKHVAQILDSRMNTKYDENDKLIREVKVITLKSKLVSDFRKDFQFYKVREINNYHHAHDAYLNAVVGTALIKKYPKLESEFVYGDYKVYDVRKMIAKSEQEIGKATAKYFFYSNIMNFFKTEITLANGEIRKRPLIETNGETGEIVWDKGRDFATVRKVLSMPQVNIVKKTEVQTGGFSKESILPKRNSDKLIARKKDWDPKKYGGFDSPTVAYSVLVVAKVEKGKSKKLKSVKELLGITIMERSSFEKNPIDFLEAKGYKEVKKDLIIKLPKYSLFELENGRKRMLASAGELQKGNELALPSKYVNFLYLASHYEKLKGSPEDNEQKQLFVEQHKHYLDEIIEQISEFSKRVILADANLDKVLSAYNKHRDKPIREQAENIIHLFTLTNLGAPAAFKYFDTTIDRKRYTSTKEVLDATLIHQSITGLYETRIDLSQLGGDGGPAPGGGEAAAKGGMDLLKPLTVERKGVKIKGYWNSQADITCVPKDLLQGEEPVRQQNVTTIHGTQEGDVYYVNLKIDGRRINTEVIGTTLDYAIITPGDVPWILKKPLELTIKLDLEEQQGTLLNNSILSKKGKEELKQLFEKYSALWQSWENQVGHRRIRPHKIATGTVKPTPQKQYHINPKAKPDIQIVINDLLKQGVLIQKESTMNTPVYPVPKPNGRWRMVLDYRAVNKVTPLIAVQNQHSYGILGSLFKGRYKTTIDLSNGFWAHPIVPEDYWITAFTWQGKQYCWTVLPQGFLNSPGLFTGDVVDLLQGIPNVEVYVDDVYISHDSEKEHLEYLDILFNRLKEAGYIISLKKSNIANSIVDFLGFQITNEGRGLTDTFKEKLENITAPTTLKQLQSILGLLNFARNFIPDFTELIAPLYALIPKSTKNYVPWQIEHSTTLETLITKLNGAEYLQGRKGDKTLIMKVNASYTTGYIRYYNEGEKKPISYVSIVFSKTELKFTELEKLLTTVHKGLLKALDLSMGQNIHVYSPIVSMQNIQKTPQTAKKALASRWLSWLSYLEDPRIRFFYDPQMPALKDLPAVDTGKDNKKHPSNFQHIFYTDGSAITSPTKEGHLNAGMGIVYFINKDGNLQKQQEWSISLGNHTAQFAEIAAFEFALKKCLPLGGNILVVTDSNYVAKAYNEELDVWASNGFVNNRKKPLKHISKWKSVADLKRLRPDVVVTHEPGHQKLDSSPHAYGNNLADQLATQASFKVHAGKRTADGSEFEKRTADGSEFESPKKKAKVE

SEQ ID NO: 7528 - protein, 2095 aa, synthetic construct
MPAAKRVKLDGGDKKYSIGLDIGTNSVGWAVITDEYKVPSKKFKVLGNTDRHSIKKNLIGALLFDSGETAEATRLKRTARRRYTRRKNRICYLQEIFSNEMAKVDDSFFHRLEESFLVEEDKKHERHPIFGNIVDEVAYHEKYPTIYHLRKKLVDSTDKADLRLIYLALAHMIKFRGHFLIEGDLNPDNSDVDKLFIQLVQTYNQLFEENPINASGVDAKAILSARLSKSRRLENLIAQLPGEKKNGLFGNLIALSLGLTPNFKSNFDLAEDAKLQLSKDTYDDDLDNLLAQIGDQYADLFLAAKNLSDAILLSDILRVNTEITKAPLSASMIKRYDEHHQDLTLLKALVRQQLPEKYKEIFFDQSKNGYAGYIDGGASQEEFYKFIKPILEKMDGTEELLVKLNREDLLRKQRTFDNGSIPHQIHLGELHAILRRQEDFYPFLKDNREKIEKILTFRIPYYVGPLARGNSRFAWMTRKSEETITPWNFEEVVDKGASAQSFIERMTNFDKNLPNEKVLPKHSLLYEYFTVYNELTKVKYVTEGMRKPAFLSGEQKKAIVDLLFKTNRKVTVKQLKEDYFKKIECFDSVEISGVEDRFNASLGTYHDLLKIIKDKDFLDNEENEDILEDIVLTLTLFEDREMIEERLKTYAHLFDDKVMKQLKRRRYTGWGRLSRKLINGIRDKQSGKTILDFLKSDGFANRNFMQLIHDDSLTFKEDIQKAQVSGQGDSLHEHIANLAGSPAIKKGILQTVKVVDELVKVMGRHKPENIVIEMARENQTTQKGQKNSRERMKRIEEGIKELGSQILKEHPVENTQLQNEKLYLYYLQNGRDMYVDQELDINRLSDYDVDHIVPQSFLKDDSIDNKVLTRSDKARGKSDNVPSEEVVKKMKNYWRQLLNAKLITQRKFDNLTKAERGGLSELDKAGFIKRQLVETRQITKHVAQILDSRMNTKYDENDKLIREVKVITLKSKLVSDFRKDFQFYKVREINNYHHAHDAYLNAVVGTALIKKYPKLESEFVYGDYKVYDVRKMIAKSEQEIGKATAKYFFYSNIMNFFKTEITLANGEIRKRPLIETNGETGEIVWDKGRDFATVRKVLSMPQVNIVKKTEVQTGGFSKESILPKRNSDKLIARKKDWDPKKYGGFDSPTVAYSVLVVAKVEKGKSKKLKSVKELLGITIMERSSFEKNPIDFLEAKGYKEVKKDLIIKLPKYSLFELENGRKRMLASAGELQKGNELALPSKYVNFLYLASHYEKLKGSPEDNEQKQLFVEQHKHYLDEIIEQISEFSKRVILADANLDKVLSAYNKHRDKPIREQAENIIHLFTLTNLGAPAAFKYFDTTIDRKRYTSTKEVLDATLIHQSITGLYETRIDLSQLGGDGGPAPGGGEAAAKGGTLQLEEEYRLFEPESTQKQEMDIWLKNFPQAWAETGGMGTAHCQAPVLIQLKATATPISIRQYPMPHEAYQGIKPHIRRMLDQGILKPCQSPWNTPLLPVKKPGTEDYRPVQDLREVNKRVEDIHPTVPNPYNLLSTLPPSHPWYTVLDLKDAFFCLRLHSESQLLFAFEWRDPEIGLSGQLTWTRLPQGFKNSPTLFNEALHSDLADFRVRYPALVLLQYVDDLLLAAATRTECLEGTKALLETLGNKGYRASAKKAQICLQEVTYLGYSLKDGQRWLTKARKEAILSIPVPKNSRQVREFLGTAGYCRLWIPGFAELAAPLYPLTRPGTLFQWGTEQQLAFEDIKKALLSSPALGLPDITKPFELFIDENSGFAKGVLVQKLGPWKRPVAYLSKKLDTVASGWPPCLRMVAAIAILVKDAGKLTLGQPLTILTSHPVEALVRQPPNKWLSNARMTHYQAMLLDAERVHFGPTVSLNPATLLPLPSGGNHHDCLQILAETHGTRPDLTDQPLPDADLTWYTDGSSFIRNGEREAGAAVTTESEVIWAAPLPPGTSAQRAELIALTQALKMAEGKKLTVYTDSRYAFATTHVHGEIYRRRGWLTSEGKEIKNKNEILALLEALFLPKRLSIIHCPGHQKGDSPQAKGNRLADDTAKKAATETHSSLTVLPAGKRTADGSEFEKRTADGSEFESPKKKAKVE

SEQ ID NO: 7529 - protein, 2094 aa, synthetic construct
MPAAKRVKLDGGDKKYSIGLDIGTNSVGWAVITDEYKVPSKKFKVLGNTDRHSIKKNLIGALLFDSGETAEATRLKRTARRRYTRRKNRICYLQEIFSNEMAKVDDSFFHRLEESFLVEEDKKHERHPIFGNIVDEVAYHEKYPTIYHLRKKLVDSTDKADLRLIYLALAHMIKFRGHFLIEGDLNPDNSDVDKLFIQLVQTYNQLFEENPINASGVDAKAILSARLSKSRRLENLIAQLPGEKKNGLFGNLIALSLGLTPNFKSNFDLAEDAKLQLSKDTYDDDLDNLLAQIGDQYADLFLAAKNLSDAILLSDILRVNTEITKAPLSASMIKRYDEHHQDLTLLKALVRQQLPEKYKEIFFDQSKNGYAGYIDGGASQEEFYKFIKPILEKMDGTEELLVKLNREDLLRKQRTFDNGSIPHQIHLGELHAILRRQEDFYPFLKDNREKIEKILTFRIPYYVGPLARGNSRFAWMTRKSEETITPWNFEEVVDKGASAQSFIERMTNFDKNLPNEKVLPKHSLLYEYFTVYNELTKVKYVTEGMRKPAFLSGEQKKAIVDLLFKTNRKVTVKQLKEDYFKKIECFDSVEISGVEDRFNASLGTYHDLLKIIKDKDFLDNEENEDILEDIVLTLTLFEDREMIEERLKTYAHLFDDKVMKQLKRRRYTGWGRLSRKLINGIRDKQSGKTILDFLKSDGFANRNFMQLIHDDSLTFKEDIQKAQVSGQGDSLHEHIANLAGSPAIKKGILQTVKVVDELVKVMGRHKPENIVIEMARENQTTQKGQKNSRERMKRIEEGIKELGSQILKEHPVENTQLQNEKLYLYYLQNGRDMYVDQELDINRLSDYDVDHIVPQSFLKDDSIDNKVLTRSDKARGKSDNVPSEEVVKKMKNYWRQLLNAKLITQRKFDNLTKAERGGLSELDKAGFIKRQLVETRQITKHVAQILDSRMNTKYDENDKLIREVKVITLKSKLVSDFRKDFQFYKVREINNYHHAHDAYLNAVVGTALIKKYPKLESEFVYGDYKVYDVRKMIAKSEQEIGKATAKYFFYSNIMNFFKTEITLANGEIRKRPLIETNGETGEIVWDKGRDFATVRKVLSMPQVNIVKKTEVQTGGFSKESILPKRNSDKLIARKKDWDPKKYGGFDSPTVAYSVLVVAKVEKGKSKKLKSVKELLGITIMERSSFEKNPIDFLEAKGYKEVKKDLIIKLPKYSLFELENGRKRMLASAGELQKGNELALPSKYVNFLYLASHYEKLKGSPEDNEQKQLFVEQHKHYLDEIIEQISEFSKRVILADANLDKVLSAYNKHRDKPIREQAENIIHLFTLTNLGAPAAFKYFDTTIDRKRYTSTKEVLDATLIHQSITGLYETRIDLSQLGGDGGPAPGGGEAAAKGGVLNLEEEYRLHEKPVPSSIDPSWLQLFPTVWAERAGMGLANQVPPVVVELRSGASPVAVRQYPMSKEAREGIRPHIQKFLDLGVLVPCRSPWNTPLLPVKKPGTNDYRPVQDLREINKRVQDIHPTVPNPYNLLSSLPPSYTWYSVLDLKDAFFCLRLHPNSQPLFAFEWKDPEKGNTGQLTWTRLPQGFKNSPTLFNEALHRDLAPFRALNPQVVLLQYVDDLLVAAPTYEDCKKGTQKLLQELSKLGYRVSAKKAQLCQREVTYLGYLLKEGKRWLTPARKATVMKIPVPTTPRQVREFLGTAGFCRLWIPGFASLAAPLYPLTKPSIPFIWTEEHQQAFDHIKKALLSAPALALPDLTKPFTLYIDERAGVARGVLTQTLGPWRRPVAYLSKKLDPVASGWPTCLKAVAAVALLLKDADKLTLGQNVTVIASHSLESIVRQPPDRWMTNARMTHYQSLLLNERVSFAPPAVLNPATLLPVESEATPVHRCSEILAEETGTRRDLEDQPLPGVPTWYTDGSSFITEGKRRAGAPIVDGKRTVWASSLPEGTSAQKAELVALTQALRLAEGKNINIYTDSRYAFATAHIHGAIYKQRGWLTSAGKDIKNKEEILALLEAIHLPRRVAIIHCPGHQRGSNPVATGNRRADEAAKQAALSTRVLAGTTKPAGKRTADGSEFEKRTADGSEFESPKKKAKVE

SEQ ID NO: 7530 - protein, 2127 aa, synthetic construct
MPAAKRVKLDGGDKKYSIGLDIGTNSVGWAVITDEYKVPSKKFKVLGNTDRHSIKKNLIGALLFDSGETAEATRLKRTARRRYTRRKNRICYLQEIFSNEMAKVDDSFFHRLEESFLVEEDKKHERHPIFGNIVDEVAYHEKYPTIYHLRKKLVDSTDKADLRLIYLALAHMIKFRGHFLIEGDLNPDNSDVDKLFIQLVQTYNQLFEENPINASGVDAKAILSARLSKSRRLENLIAQLPGEKKNGLFGNLIALSLGLTPNFKSNFDLAEDAKLQLSKDTYDDDLDNLLAQIGDQYADLFLAAKNLSDAILLSDILRVNTEITKAPLSASMIKRYDEHHQDLTLLKALVRQQLPEKYKEIFFDQSKNGYAGYIDGGASQEEFYKFIKPILEKMDGTEELLVKLNREDLLRKQRTFDNGSIPHQIHLGELHAILRRQEDFYPFLKDNREKIEKILTFRIPYYVGPLARGNSRFAWMTRKSEETITPWNFEEVVDKGASAQSFIERMTNFDKNLPNEKVLPKHSLLYEYFTVYNELTKVKYVTEGMRKPAFLSGEQKKAIVDLLFKTNRKVTVKQLKEDYFKKIECFDSVEISGVEDRFNASLGTYHDLLKIIKDKDFLDNEENEDILEDIVLTLTLFEDREMIEERLKTYAHLFDDKVMKQLKRRRYTGWGRLSRKLINGIRDKQSGKTILDFLKSDGFANRNFMQLIHDDSLTFKEDIQKAQVSGQGDSLHEHIANLAGSPAIKKGILQTVKVVDELVKVMGRHKPENIVIEMARENQTTQKGQKNSRERMKRIEEGIKELGSQILKEHPVENTQLQNEKLYLYYLQNGRDMYVDQELDINRLSDYDVDHIVPQSFLKDDSIDNKVLTRSDKARGKSDNVPSEEVVKKMKNYWRQLLNAKLITQRKFDNLTKAERGGLSELDKAGFIKRQLVETRQITKHVAQILDSRMNTKYDENDKLIREVKVITLKSKLVSDFRKDFQFYKVREINNYHHAHDAYLNAVVGTALIKKYPKLESEFVYGDYKVYDVRKMIAKSEQEIGKATAKYFFYSNIMNFFKTEITLANGEIRKRPLIETNGETGEIVWDKGRDFATVRKVLSMPQVNIVKKTEVQTGGFSKESILPKRNSDKLIARKKDWDPKKYGGFDSPTVAYSVLVVAKVEKGKSKKLKSVKELLGITIMERSSFEKNPIDFLEAKGYKEVKKDLIIKLPKYSLFELENGRKRMLASAGELQKGNELALPSKYVNFLYLASHYEKLKGSPEDNEQKQLFVEQHKHYLDEIIEQISEFSKRVILADANLDKVLSAYNKHRDKPIREQAENIIHLFTLTNLGAPAAFKYFDTTIDRKRYTSTKEVLDATLIHQSITGLYETRIDLSQLGGDGGPAPGGGEAAAKGGLLGRDLLTKLKAQIQFSTEGPQVTWEDRPAMCLVLNLEEEYRLHEKPVPPSIDPSWLQLFPMVWAEKAGMGLANQVPPVVVELKSDASPVAVRQYPMSKEAREGIRPHIQRFLDLGILVPCQSPWNTPLLPVKKPGTNDYRPVQDLREVNKRVQDIHPTVPNPYNLLSSLPPSHTWYSVLDLKDAFFCLKLHPNSQPLFAFEWRDPEKGNTGQLTWTRLPQGFKNSPTLFNEALHRDLASFRALNPQVVMLQYVDDLLVAAPTYRDCKEGTRRLLQELSKLGYRVSAKKAQLCREEVTYLGYLLKGGKRWLTPARKATVMKIPTPTTPRQVREFLGTAGFCRLWIPGFASLAAPLYPLTRPKVPFTWTEAHQEAFGRIKEALLSAPALALPDLTKPFALYVDEKEGVARGVLTQTLGPWRRPVAYLSKKLDPVASGWPTCLKAIAAVALLLKDADKLTLGQNVLVIAPHNLESIVRQPPDRWMTNARMTHYQSLLLNERVSFAPPAILNPATLLPVESDDTPIHICSEILAEETGTRPDLRDQPLPGVPAWYTDGSSFIMDGRRQAGAAIVDNKRTVWASNLPEGTSAQKAELIALTQALRLAEGKSINIYTDSRYAFATAHVHGAIYKQRGWLTSAGKDIKNKEEILALLEAIHLPKRVAIIHCPGHQRGTDPVATGNRKADEAAKQAAQSTRILTETTKNAGKRTADGSEFEKRTADGSEFESPKKKAKVE

SEQ ID NO: 7531 - protein, 2127 aa, synthetic construct
MPAAKRVKLDGGDKKYSIGLDIGTNSVGWAVITDEYKVPSKKFKVLGNTDRHSIKKNLIGALLFDSGETAEATRLKRTARRRYTRRKNRICYLQEIFSNEMAKVDDSFFHRLEESFLVEEDKKHERHPIFGNIVDEVAYHEKYPTIYHLRKKLVDSTDKADLRLIYLALAHMIKFRGHFLIEGDLNPDNSDVDKLFIQLVQTYNQLFEENPINASGVDAKAILSARLSKSRRLENLIAQLPGEKKNGLFGNLIALSLGLTPNFKSNFDLAEDAKLQLSKDTYDDDLDNLLAQIGDQYADLFLAAKNLSDAILLSDILRVNTEITKAPLSASMIKRYDEHHQDLTLLKALVRQQLPEKYKEIFFDQSKNGYAGYIDGGASQEEFYKFIKPILEKMDGTEELLVKLNREDLLRKQRTFDNGSIPHQIHLGELHAILRRQEDFYPFLKDNREKIEKILTFRIPYYVGPLARGNSRFAWMTRKSEETITPWNFEEVVDKGASAQSFIERMTNFDKNLPNEKVLPKHSLLYEYFTVYNELTKVKYVTEGMRKPAFLSGEQKKAIVDLLFKTNRKVTVKQLKEDYFKKIECFDSVEISGVEDRFNASLGTYHDLLKIIKDKDFLDNEENEDILEDIVLTLTLFEDREMIEERLKTYAHLFDDKVMKQLKRRRYTGWGRLSRKLINGIRDKQSGKTILDFLKSDGFANRNFMQLIHDDSLTFKEDIQKAQVSGQGDSLHEHIANLAGSPAIKKGILQTVKVVDELVKVMGRHKPENIVIEMARENQTTQKGQKNSRERMKRIEEGIKELGSQILKEHPVENTQLQNEKLYLYYLQNGRDMYVDQELDINRLSDYDVDHIVPQSFLKDDSIDNKVLTRSDKARGKSDNVPSEEVVKKMKNYWRQLLNAKLITQRKFDNLTKAERGGLSELDKAGFIKRQLVETRQITKHVAQILDSRMNTKYDENDKLIREVKVITLKSKLVSDFRKDFQFYKVREINNYHHAHDAYLNAVVGTALIKKYPKLESEFVYGDYKVYDVRKMIAKSEQEIGKATAKYFFYSNIMNFFKTEITLANGEIRKRPLIETNGETGEIVWDKGRDFATVRKVLSMPQVNIVKKTEVQTGGFSKESILPKRNSDKLIARKKDWDPKKYGGFDSPTVAYSVLVVAKVEKGKSKKLKSVKELLGITIMERSSFEKNPIDFLEAKGYKEVKKDLIIKLPKYSLFELENGRKRMLASAGELQKGNELALPSKYVNFLYLASHYEKLKGSPEDNEQKQLFVEQHKHYLDEIIEQISEFSKRVILADANLDKVLSAYNKHRDKPIREQAENIIHLFTLTNLGAPAAFKYFDTTIDRKRYTSTKEVLDATLIHQSITGLYETRIDLSQLGGDGGPAPGGGEAAAKGGLLGRDLLTKLKAQIQFSTEGPQVTWEDRPAMCLVLNLEEEYRLHEKPVPPSIDPSWLQLFPMVWAEKAGMGLANQVPPVVVELKSDASPVAVRQYPMSKEAREGIRPHIQRFLDLGILVPCQSPWNTPLLPVKKPGTNDYRPVQDLREVNKRVQDIHPTVPNPYNLLSSLPPSHTWYSVLDLKDAFFCLKLHPNSQPLFAFEWRDPEKGNTGQLTWTRLPQGFKNSPTLFNEALHRDLASFRALNPQVVMLQYVDDLLVAAPTYRDCKEGTRRLLQELSKLGYRVSAKKAQLCREEVTYLGYLLKGGKRWLTPARKATVMKIPTPTTPRQVREFLGKAGFCRLFIPGFASLAAPLYPLTRPKVPFTWTEAHQEAFGRIKEALLSAPALALPDLTKPFALYVDEKEGVARGVLTQTLGPWRRPVAYLSKKLDPVASGWPTCLKAIAAVALLLKDADKLTLGQNVLVIAPHNLESIVRQPPDRWMTNARMTHYQSLLLNERVSFAPPAILNPATLLPVESDDTPIHICSEILAEETGTRPDLRDQPLPGVPAWYTDGSSFIMDGRRQAGAAIVDNKRTVWASNLPEGTSAQKAELIALTQALRLAEGKSINIYTDSRYAFATAHVHGAIYKQRGWLTSAGKDIKNKEEILALLEAIHLPKRVAIIHCPGHQRGTDPVATGNRKADEAAKQAAQSTRILTETTKNAGKRTADGSEFEKRTADGSEFESPKKKAKVE

SEQ ID NO: 7532 - protein, 2218 aa, synthetic construct
MPAAKRVKLDGGDKKYSIGLDIGTNSVGWAVITDEYKVPSKKFKVLGNTDRHSIKKNLIGALLFDSGETAEATRLKRTARRRYTRRKNRICYLQEIFSNEMAKVDDSFFHRLEESFLVEEDKKHERHPIFGNIVDEVAYHEKYPTIYHLRKKLVDSTDKADLRLIYLALAHMIKFRGHFLIEGDLNPDNSDVDKLFIQLVQTYNQLFEENPINASGVDAKAILSARLSKSRRLENLIAQLPGEKKNGLFGNLIALSLGLTPNFKSNFDLAEDAKLQLSKDTYDDDLDNLLAQIGDQYADLFLAAKNLSDAILLSDILRVNTEITKAPLSASMIKRYDEHHQDLTLLKALVRQQLPEKYKEIFFDQSKNGYAGYIDGGASQEEFYKFIKPILEKMDGTEELLVKLNREDLLRKQRTFDNGSIPHQIHLGELHAILRRQEDFYPFLKDNREKIEKILTFRIPYYVGPLARGNSRFAWMTRKSEETITPWNFEEVVDKGASAQSFIERMTNFDKNLPNEKVLPKHSLLYEYFTVYNELTKVKYVTEGMRKPAFLSGEQKKAIVDLLFKTNRKVTVKQLKEDYFKKIECFDSVEISGVEDRFNASLGTYHDLLKIIKDKDFLDNEENEDILEDIVLTLTLFEDREMIEERLKTYAHLFDDKVMKQLKRRRYTGWGRLSRKLINGIRDKQSGKTILDFLKSDGFANRNFMQLIHDDSLTFKEDIQKAQVSGQGDSLHEHIANLAGSPAIKKGILQTVKVVDELVKVMGRHKPENIVIEMARENQTTQKGQKNSRERMKRIEEGIKELGSQILKEHPVENTQLQNEKLYLYYLQNGRDMYVDQELDINRLSDYDVDHIVPQSFLKDDSIDNKVLTRSDKARGKSDNVPSEEVVKKMKNYWRQLLNAKLITQRKFDNLTKAERGGLSELDKAGFIKRQLVETRQITKHVAQILDSRMNTKYDENDKLIREVKVITLKSKLVSDFRKDFQFYKVREINNYHHAHDAYLNAVVGTALIKKYPKLESEFVYGDYKVYDVRKMIAKSEQEIGKATAKYFFYSNIMNFFKTEITLANGEIRKRPLIETNGETGEIVWDKGRDFATVRKVLSMPQVNIVKKTEVQTGGFSKESILPKRNSDKLIARKKDWDPKKYGGFDSPTVAYSVLVVAKVEKGKSKKLKSVKELLGITIMERSSFEKNPIDFLEAKGYKEVKKDLIIKLPKYSLFELENGRKRMLASAGELQKGNELALPSKYVNFLYLASHYEKLKGSPEDNEQKQLFVEQHKHYLDEIIEQISEFSKRVILADANLDKVLSAYNKHRDKPIREQAENIIHLFTLTNLGAPAAFKYFDTTIDRKRYTSTKEVLDATLIHQSITGLYETRIDLSQLGGDGGPAPGGGEAAAKGGTLGDQGSRGSDPLPEPRVTLTVEGIPTEFLVNTGAEHSVLTKPMGKMGSKRTVVAGATGSKVYPWTTKRLLKIGQKQVTHSFLVIPECPAPLLGRDLLTKLKAQIQFSTEGPQVTWEDRPAMCLVLNLEEEYRLHEKPVPPSIDPSWLQLFPMVWAEKAGMGLANQVPPVVVELKSDASPVAVRQYPMSKEAREGIRPHIQRFLDLGILVPCQSPWNTPLLPVKKPGTNDYRPVQDLREVNKRVQDIHPTVPNPYNLLSSLPPSHTWYSVLDLKDAFFCLKLHPNSQPLFAFEWRDPEKGNTGQLTWTRLPQGFKNSPTLFNEALHRDLASFRALNPQVVMLQYVDDLLVAAPTYRDCKEGTRRLLQELSKLGYRVSAKKAQLCREEVTYLGYLLKGGKRWLTPARKATVMKIPTPTTPRQVREFLGTAGFCRLWIPGFASLAAPLYPLTRPKVPFTWTEAHQEAFGRIKEALLSAPALALPDLTKPFALYVDEKEGVARGVLTQTLGPWRRPVAYLSKKLDPVASGWPTCLKAIAAVALLLKDADKLTLGQNVLVIAPHNLESIVRQPPDRWMTNARMTHYQSLLLNERVSFAPPAILNPATLLPVESDDTPIHICSEILAEETGTRPDLRDQPLPGVPAWYTDGSSFIMDGRRQAGAAIVDNKRTVWASNLPEGTSAQKAELIALTQALRLAEGKSINIYTDSRYAFATAHVHGAIYKQRGWLTSAGKDIKNKEEILALLEAIHLPKRVAIIHCPGHQRGTDPVATGNRKADEAAKQAAQSTRILTETTKNAGKRTADGSEFEKRTADGSEFESPKKKAKVE

SEQ ID NO: 7533 - protein, 2218 aa, synthetic construct
MPAAKRVKLDGGDKKYSIGLDIGTNSVGWAVITDEYKVPSKKFKVLGNTDRHSIKKNLIGALLFDSGETAEATRLKRTARRRYTRRKNRICYLQEIFSNEMAKVDDSFFHRLEESFLVEEDKKHERHPIFGNIVDEVAYHEKYPTIYHLRKKLVDSTDKADLRLIYLALAHMIKFRGHFLIEGDLNPDNSDVDKLFIQLVQTYNQLFEENPINASGVDAKAILSARLSKSRRLENLIAQLPGEKKNGLFGNLIALSLGLTPNFKSNFDLAEDAKLQLSKDTYDDDLDNLLAQIGDQYADLFLAAKNLSDAILLSDILRVNTEITKAPLSASMIKRYDEHHQDLTLLKALVRQQLPEKYKEIFFDQSKNGYAGYIDGGASQEEFYKFIKPILEKMDGTEELLVKLNREDLLRKQRTFDNGSIPHQIHLGELHAILRRQEDFYPFLKDNREKIEKILTFRIPYYVGPLARGNSRFAWMTRKSEETITPWNFEEVVDKGASAQSFIERMTNFDKNLPNEKVLPKHSLLYEYFTVYNELTKVKYVTEGMRKPAFLSGEQKKAIVDLLFKTNRKVTVKQLKEDYFKKIECFDSVEISGVEDRFNASLGTYHDLLKIIKDKDFLDNEENEDILEDIVLTLTLFEDREMIEERLKTYAHLFDDKVMKQLKRRRYTGWGRLSRKLINGIRDKQSGKTILDFLKSDGFANRNFMQLIHDDSLTFKEDIQKAQVSGQGDSLHEHIANLAGSPAIKKGILQTVKVVDELVKVMGRHKPENIVIEMARENQTTQKGQKNSRERMKRIEEGIKELGSQILKEHPVENTQLQNEKLYLYYLQNGRDMYVDQELDINRLSDYDVDHIVPQSFLKDDSIDNKVLTRSDKARGKSDNVPSEEVVKKMKNYWRQLLNAKLITQRKFDNLTKAERGGLSELDKAGFIKRQLVETRQITKHVAQILDSRMNTKYDENDKLIREVKVITLKSKLVSDFRKDFQFYKVREINNYHHAHDAYLNAVVGTALIKKYPKLESEFVYGDYKVYDVRKMIAKSEQEIGKATAKYFFYSNIMNFFKTEITLANGEIRKRPLIETNGETGEIVWDKGRDFATVRKVLSMPQVNIVKKTEVQTGGFSKESILPKRNSDKLIARKKDWDPKKYGGFDSPTVAYSVLVVAKVEKGKSKKLKSVKELLGITIMERSSFEKNPIDFLEAKGYKEVKKDLIIKLPKYSLFELENGRKRMLASAGELQKGNELALPSKYVNFLYLASHYEKLKGSPEDNEQKQLFVEQHKHYLDEIIEQISEFSKRVILADANLDKVLSAYNKHRDKPIREQAENIIHLFTLTNLGAPAAFKYFDTTIDRKRYTSTKEVLDATLIHQSITGLYETRIDLSQLGGDGGPAPGGGEAAAKGGTLGDQGSRGSDPLPEPRVTLTVEGIPTEFLVNTGAEHSVLTKPMGKMGSKRTVVAGATGSKVYPWTTKRLLKIGQKQVTHSFLVIPECPAPLLGRDLLTKLKAQIQFSTEGPQVTWEDRPAMCLVLNLEEEYRLHEKPVPPSIDPSWLQLFPMVWAEKAGMGLANQVPPVVVELKSDASPVAVRQYPMSKEAREGIRPHIQRFLDLGILVPCQSPWNTPLLPVKKPGTNDYRPVQDLREVNKRVQDIHPTVPNPYNLLSSLPPSHTWYSVLDLKDAFFCLKLHPNSQPLFAFEWRDPEKGNTGQLTWTRLPQGFKNSPTLFNEALHRDLASFRALNPQVVMLQYVDDLLVAAPTYRDCKEGTRRLLQELSKLGYRVSAKKAQLCREEVTYLGYLLKGGKRWLTPARKATVMKIPTPTTPRQVREFLGKAGFCRLFIPGFASLAAPLYPLTRPKVPFTWTEAHQEAFGRIKEALLSAPALALPDLTKPFALYVDEKEGVARGVLTQTLGPWRRPVAYLSKKLDPVASGWPTCLKAIAAVALLLKDADKLTLGQNVLVIAPHNLESIVRQPPDRWMTNARMTHYQSLLLNERVSFAPPAILNPATLLPVESDDTPIHICSEILAEETGTRPDLRDQPLPGVPAWYTDGSSFIMDGRRQAGAAIVDNKRTVWASNLPEGTSAQKAELIALTQALRLAEGKSINIYTDSRYAFATAHVHGAIYKQRGWLTSAGKDIKNKEEILALLEAIHLPKRVAIIHCPGHQRGTDPVATGNRKADEAAKQAAQSTRILTETTKNAGKRTADGSEFEKRTADGSEFESPKKKAKVE

SEQ ID NO: 7534 - protein, 2096 aa, synthetic construct
MPAAKRVKLDGGDKKYSIGLDIGTNSVGWAVITDEYKVPSKKFKVLGNTDRHSIKKNLIGALLFDSGETAEATRLKRTARRRYTRRKNRICYLQEIFSNEMAKVDDSFFHRLEESFLVEEDKKHERHPIFGNIVDEVAYHEKYPTIYHLRKKLVDSTDKADLRLIYLALAHMIKFRGHFLIEGDLNPDNSDVDKLFIQLVQTYNQLFEENPINASGVDAKAILSARLSKSRRLENLIAQLPGEKKNGLFGNLIALSLGLTPNFKSNFDLAEDAKLQLSKDTYDDDLDNLLAQIGDQYADLFLAAKNLSDAILLSDILRVNTEITKAPLSASMIKRYDEHHQDLTLLKALVRQQLPEKYKEIFFDQSKNGYAGYIDGGASQEEFYKFIKPILEKMDGTEELLVKLNREDLLRKQRTFDNGSIPHQIHLGELHAILRRQEDFYPFLKDNREKIEKILTFRIPYYVGPLARGNSRFAWMTRKSEETITPWNFEEVVDKGASAQSFIERMTNFDKNLPNEKVLPKHSLLYEYFTVYNELTKVKYVTEGMRKPAFLSGEQKKAIVDLLFKTNRKVTVKQLKEDYFKKIECFDSVEISGVEDRFNASLGTYHDLLKIIKDKDFLDNEENEDILEDIVLTLTLFEDREMIEERLKTYAHLFDDKVMKQLKRRRYTGWGRLSRKLINGIRDKQSGKTILDFLKSDGFANRNFMQLIHDDSLTFKEDIQKAQVSGQGDSLHEHIANLAGSPAIKKGILQTVKVVDELVKVMGRHKPENIVIEMARENQTTQKGQKNSRERMKRIEEGIKELGSQILKEHPVENTQLQNEKLYLYYLQNGRDMYVDQELDINRLSDYDVDHIVPQSFLKDDSIDNKVLTRSDKARGKSDNVPSEEVVKKMKNYWRQLLNAKLITQRKFDNLTKAERGGLSELDKAGFIKRQLVETRQITKHVAQILDSRMNTKYDENDKLIREVKVITLKSKLVSDFRKDFQFYKVREINNYHHAHDAYLNAVVGTALIKKYPKLESEFVYGDYKVYDVRKMIAKSEQEIGKATAKYFFYSNIMNFFKTEITLANGEIRKRPLIETNGETGEIVWDKGRDFATVRKVLSMPQVNIVKKTEVQTGGFSKESILPKRNSDKLIARKKDWDPKKYGGFDSPTVAYSVLVVAKVEKGKSKKLKSVKELLGITIMERSSFEKNPIDFLEAKGYKEVKKDLIIKLPKYSLFELENGRKRMLASAGELQKGNELALPSKYVNFLYLASHYEKLKGSPEDNEQKQLFVEQHKHYLDEIIEQISEFSKRVILADANLDKVLSAYNKHRDKPIREQAENIIHLFTLTNLGAPAAFKYFDTTIDRKRYTSTKEVLDATLIHQSITGLYETRIDLSQLGGDGGPAPGGGEAAAKGGTLNLEDEYRLYETSAEPEVSPGSTWLSDFPQAWAETGGMGLAVRQAPLIIPLKATSTPVSIKQYPMSQEAKLGIKPHIQRLLDQGILVPCQSPWNTPLLPVKKPGTNDYRPVQDLREVNKRVEDIHPTVPNPYNLLSGLPPSHRWYTVLDLKDAFFCLRLHPTSQPLFAFEWRDPGMGISGQLTWTRLPQGFKNSPTLFNEALHRDLADFRIQHPDLILLQYVDDILLAATSELDCQQGTRALLLTLGNLGYRASAKKAQLCQKQVKYLGYLLKEGQRWLTEARKETVMGQPTPKTPRQLREFLGTAGFCRLWIPGFAEMAAPLYPLTKPGTLFNWGPDQQKAYQEIKQALLTAPALGLPDLTKPFELFVDEKQGYAKGVLTQKLGPWRRPVAYLSKKLDPVAAGWPPCLRMVAAIAVLRKDAGKLTMGQPLVILAPHAVEALVKQPPDRWLSNARMTHYQAMLLDTDRVQFGPVVALNPATLLPLPEEGAPHDCLEILAETHGTRPDLTDQPIPDADHTWYTDGSSFLQEGQRKAGAAVTTETEVIWARALPAGTSAQRAELIALTQALKMAEGKRLNVYTDSRYAFATAHIHGEIYRRRGWLTSEGREIKNKSEILALLKALFLPKRLSIIHCLGHQKGDSAEARGNRLADQAAREAAIKTPPDTSTLLAGKRTADGSEFEKRTADGSEFESPKKKAKVE

SEQ ID NO: 7535 - protein, 2096 aa, synthetic construct
MPAAKRVKLDGGDKKYSIGLDIGTNSVGWAVITDEYKVPSKKFKVLGNTDRHSIKKNLIGALLFDSGETAEATRLKRTARRRYTRRKNRICYLQEIFSNEMAKVDDSFFHRLEESFLVEEDKKHERHPIFGNIVDEVAYHEKYPTIYHLRKKLVDSTDKADLRLIYLALAHMIKFRGHFLIEGDLNPDNSDVDKLFIQLVQTYNQLFEENPINASGVDAKAILSARLSKSRRLENLIAQLPGEKKNGLFGNLIALSLGLTPNFKSNFDLAEDAKLQLSKDTYDDDLDNLLAQIGDQYADLFLAAKNLSDAILLSDILRVNTEITKAPLSASMIKRYDEHHQDLTLLKALVRQQLPEKYKEIFFDQSKNGYAGYIDGGASQEEFYKFIKPILEKMDGTEELLVKLNREDLLRKQRTFDNGSIPHQIHLGELHAILRRQEDFYPFLKDNREKIEKILTFRIPYYVGPLARGNSRFAWMTRKSEETITPWNFEEVVDKGASAQSFIERMTNFDKNLPNEKVLPKHSLLYEYFTVYNELTKVKYVTEGMRKPAFLSGEQKKAIVDLLFKTNRKVTVKQLKEDYFKKIECFDSVEISGVEDRFNASLGTYHDLLKIIKDKDFLDNEENEDILEDIVLTLTLFEDREMIEERLKTYAHLFDDKVMKQLKRRRYTGWGRLSRKLINGIRDKQSGKTILDFLKSDGFANRNFMQLIHDDSLTFKEDIQKAQVSGQGDSLHEHIANLAGSPAIKKGILQTVKVVDELVKVMGRHKPENIVIEMARENQTTQKGQKNSRERMKRIEEGIKELGSQILKEHPVENTQLQNEKLYLYYLQNGRDMYVDQELDINRLSDYDVDHIVPQSFLKDDSIDNKVLTRSDKARGKSDNVPSEEVVKKMKNYWRQLLNAKLITQRKFDNLTKAERGGLSELDKAGFIKRQLVETRQITKHVAQILDSRMNTKYDENDKLIREVKVITLKSKLVSDFRKDFQFYKVREINNYHHAHDAYLNAVVGTALIKKYPKLESEFVYGDYKVYDVRKMIAKSEQEIGKATAKYFFYSNIMNFFKTEITLANGEIRKRPLIETNGETGEIVWDKGRDFATVRKVLSMPQVNIVKKTEVQTGGFSKESILPKRNSDKLIARKKDWDPKKYGGFDSPTVAYSVLVVAKVEKGKSKKLKSVKELLGITIMERSSFEKNPIDFLEAKGYKEVKKDLIIKLPKYSLFELENGRKRMLASAGELQKGNELALPSKYVNFLYLASHYEKLKGSPEDNEQKQLFVEQHKHYLDEIIEQISEFSKRVILADANLDKVLSAYNKHRDKPIREQAENIIHLFTLTNLGAPAAFKYFDTTIDRKRYTSTKEVLDATLIHQSITGLYETRIDLSQLGGDGGPAPGGGEAAAKGGTLGIEDEYRLHETSTEPDVSLGSTWLSDFPQAWAETGGMGLAVRQAPLIIPLKATSTPVSIQQYPMSHEARLGIKPHIQRLLDQGILVPCQSPWNTPLLPVKKPGTNDYRPVQDLREVNKRVEDIHPTVPNPYNLLSGLPPSHQWYTVLDLKDAFFCLRLHPTSQPLFAFEWRDPGMGISGQLTWTRLPQGFKNSPTLFNEALHRDLADFRIQHPDLILLQYVDDILLAATSELDCQQGTRALLQTLGDLGYRASAKKAQICQKQVKYLGYLLREGQRWLTEARKETVMGQPVPKTPRQLREFLGTAGFCRLWIPGFAEMAAPLYPLTKPGTLFSWGPDQQKAYQEIKQALLTAPALGLPDLTKPFELFVDEKQGYAKGVLTQKLGPWRRPVAYLSKKLDPVAAGWPPCLRMVAAIAVLTKDAGKLTMGQPLVILAPHAVEALVKQPPDRWLSNARMTHYQAMLLDTDRVQFGPVVALNPATLLPLPEEGAPHDCLEILAETHGTRPDLTDQPIPDADHTWYTDGSSFLQEGQRKAGAAVTTETEVIWAGALPAGTSAQRAELIALTQALKMAEGKRLNVYTDSRYAFATAHIHGEIYRRRGWLTSEGREIKNKSEILALLKALFLPKRLSIIHCLGHQKGDSAEARGNRLADQAAREAAIKTPPDTSTLLAGKRTADGSEFEKRTADGSEFESPKKKAKVE

SEQ ID NO: 7536 - protein, 2096 aa, synthetic construct
MPAAKRVKLDGGDKKYSIGLDIGTNSVGWAVITDEYKVPSKKFKVLGNTDRHSIKKNLIGALLFDSGETAEATRLKRTARRRYTRRKNRICYLQEIFSNEMAKVDDSFFHRLEESFLVEEDKKHERHPIFGNIVDEVAYHEKYPTIYHLRKKLVDSTDKADLRLIYLALAHMIKFRGHFLIEGDLNPDNSDVDKLFIQLVQTYNQLFEENPINASGVDAKAILSARLSKSRRLENLIAQLPGEKKNGLFGNLIALSLGLTPNFKSNFDLAEDAKLQLSKDTYDDDLDNLLAQIGDQYADLFLAAKNLSDAILLSDILRVNTEITKAPLSASMIKRYDEHHQDLTLLKALVRQQLPEKYKEIFFDQSKNGYAGYIDGGASQEEFYKFIKPILEKMDGTEELLVKLNREDLLRKQRTFDNGSIPHQIHLGELHAILRRQEDFYPFLKDNREKIEKILTFRIPYYVGPLARGNSRFAWMTRKSEETITPWNFEEVVDKGASAQSFIERMTNFDKNLPNEKVLPKHSLLYEYFTVYNELTKVKYVTEGMRKPAFLSGEQKKAIVDLLFKTNRKVTVKQLKEDYFKKIECFDSVEISGVEDRFNASLGTYHDLLKIIKDKDFLDNEENEDILEDIVLTLTLFEDREMIEERLKTYAHLFDDKVMKQLKRRRYTGWGRLSRKLINGIRDKQSGKTILDFLKSDGFANRNFMQLIHDDSLTFKEDIQKAQVSGQGDSLHEHIANLAGSPAIKKGILQTVKVVDELVKVMGRHKPENIVIEMARENQTTQKGQKNSRERMKRIEEGIKELGSQILKEHPVENTQLQNEKLYLYYLQNGRDMYVDQELDINRLSDYDVDHIVPQSFLKDDSIDNKVLTRSDKARGKSDNVPSEEVVKKMKNYWRQLLNAKLITQRKFDNLTKAERGGLSELDKAGFIKRQLVETRQITKHVAQILDSRMNTKYDENDKLIREVKVITLKSKLVSDFRKDFQFYKVREINNYHHAHDAYLNAVVGTALIKKYPKLESEFVYGDYKVYDVRKMIAKSEQEIGKATAKYFFYSNIMNFFKTEITLANGEIRKRPLIETNGETGEIVWDKGRDFATVRKVLSMPQVNIVKKTEVQTGGFSKESILPKRNSDKLIARKKDWDPKKYGGFDSPTVAYSVLVVAKVEKGKSKKLKSVKELLGITIMERSSFEKNPIDFLEAKGYKEVKKDLIIKLPKYSLFELENGRKRMLASAGELQKGNELALPSKYVNFLYLASHYEKLKGSPEDNEQKQLFVEQHKHYLDEIIEQISEFSKRVILADANLDKVLSAYNKHRDKPIREQAENIIHLFTLTNLGAPAAFKYFDTTIDRKRYTSTKEVLDATLIHQSITGLYETRIDLSQLGGDGGPAPGGGEAAAKGGTLNIEDEYRLHETSKEPDVSLGSTWLSDFPQAWAETGGMGLAVRQAPLIIPLKATSTPVSIKQYPMSQEARLGIKPHIQRLLDQGILVPCQSPWNTPLLPVKKPGTNDYRPVQDLREVNKRVEDIHPTVPNPYNLLSGLPPSHQWYTVLDLKDAFFCLRLHPTSQPLFAFEWRDPEMGISGQLTWTRLPQGFKNSPTLFNEALHRDLAGFRIQHPDLILLQYVDDLLLAATSELDCQQGTRALLQTLGDLGYRASAKKAQICQKQVKYLGYLLKEGQRWLTEARKETVMGQPIPKTPRQLREFLGTAGFCRLWIPGFAEMAAPLYPLTKPGTLFNWGPDQQKAFQEIKQALLTAPALGLPDLTKPFELFVDEKQGYAKGVLTQKLGPWRRPVAYLSKKLDPVAAGWPPCLRMVAAIAVLTKDAGKLTMGQPLVILAPHAVEALVKQPPDRWLSNARMTHYQALLLDTDRVQFGPVVALNPATLLPLPEEGLQHDCLDILAEAHGTRSDLMDQPLPDADHTWYTDGSSFLQEGQRKAGAAVTTETEVIWARALPAGTSAQRAELIALTQALKMAEGKKLNVYTDSRYAFATAHIHGEIYRRRGWLTSEGKEIKNKDEILALLKALFLPKRLSIIHCPGHQKGNSAEARGNRMADQAAREVATRETPETSTLLAGKRTADGSEFEKRTADGSEFESPKKKAKVE

SEQ ID NO: 7537 - protein, 2096 aa, synthetic construct
MPAAKRVKLDGGDKKYSIGLDIGTNSVGWAVITDEYKVPSKKFKVLGNTDRHSIKKNLIGALLFDSGETAEATRLKRTARRRYTRRKNRICYLQEIFSNEMAKVDDSFFHRLEESFLVEEDKKHERHPIFGNIVDEVAYHEKYPTIYHLRKKLVDSTDKADLRLIYLALAHMIKFRGHFLIEGDLNPDNSDVDKLFIQLVQTYNQLFEENPINASGVDAKAILSARLSKSRRLENLIAQLPGEKKNGLFGNLIALSLGLTPNFKSNFDLAEDAKLQLSKDTYDDDLDNLLAQIGDQYADLFLAAKNLSDAILLSDILRVNTEITKAPLSASMIKRYDEHHQDLTLLKALVRQQLPEKYKEIFFDQSKNGYAGYIDGGASQEEFYKFIKPILEKMDGTEELLVKLNREDLLRKQRTFDNGSIPHQIHLGELHAILRRQEDFYPFLKDNREKIEKILTFRIPYYVGPLARGNSRFAWMTRKSEETITPWNFEEVVDKGASAQSFIERMTNFDKNLPNEKVLPKHSLLYEYFTVYNELTKVKYVTEGMRKPAFLSGEQKKAIVDLLFKTNRKVTVKQLKEDYFKKIECFDSVEISGVEDRFNASLGTYHDLLKIIKDKDFLDNEENEDILEDIVLTLTLFEDREMIEERLKTYAHLFDDKVMKQLKRRRYTGWGRLSRKLINGIRDKQSGKTILDFLKSDGFANRNFMQLIHDDSLTFKEDIQKAQVSGQGDSLHEHIANLAGSPAIKKGILQTVKVVDELVKVMGRHKPENIVIEMARENQTTQKGQKNSRERMKRIEEGIKELGSQILKEHPVENTQLQNEKLYLYYLQNGRDMYVDQELDINRLSDYDVDHIVPQSFLKDDSIDNKVLTRSDKARGKSDNVPSEEVVKKMKNYWRQLLNAKLITQRKFDNLTKAERGGLSELDKAGFIKRQLVETRQITKHVAQILDSRMNTKYDENDKLIREVKVITLKSKLVSDFRKDFQFYKVREINNYHHAHDAYLNAVVGTALIKKYPKLESEFVYGDYKVYDVRKMIAKSEQEIGKATAKYFFYSNIMNFFKTEITLANGEIRKRPLIETNGETGEIVWDKGRDFATVRKVLSMPQVNIVKKTEVQTGGFSKESILPKRNSDKLIARKKDWDPKKYGGFDSPTVAYSVLVVAKVEKGKSKKLKSVKELLGITIMERSSFEKNPIDFLEAKGYKEVKKDLIIKLPKYSLFELENGRKRMLASAGELQKGNELALPSKYVNFLYLASHYEKLKGSPEDNEQKQLFVEQHKHYLDEIIEQISEFSKRVILADANLDKVLSAYNKHRDKPIREQAENIIHLFTLTNLGAPAAFKYFDTTIDRKRYTSTKEVLDATLIHQSITGLYETRIDLSQLGGDGGPAPGGGEAAAKGGTLNIEDEHRLHETSKEPDVSLGSTWLSDFPQAWAETGGMGLAVRQAPLIIPLKATSTPVSIKQYPMSQEARLGIKPHIQRLLDQGILVPCQSPWNTPLLPVKKPGTNDYRPVQDLREVNKRVEDIHPTVPNPYNLLSGLPPSHQWYTVLDLKDAFFCLRLHPTSQPLFAFEWRDPEMGISGQLTWTRLPQGFKNSPTLFNEALHRDLADFRIQHPDLILLQYVDDLLLAATSELDCQQGTRALLQTLGNLGYRASAKKAQICQKQVKYLGYLLKEGQRWLTEARKETVMGQPTPKTPRQLREFLGTAGFCRLWIPGFAEMAAPLYPLTKPGTLFNWGPDQQKAYQEIKQALLTAPALGLPDLTKPFELFVDEKQGYAKGVLTQKLGPWRRPVAYLSKKLDPVAAGWPPCLRMVAAIAVLTKDAGKLTMGQPLVILAPHAVEALVKQPPDRWLSNARMTHYQALLLDTDRVQFGPVVALNPATLLPLPEEGLQHNCLDILAEAHGTRPDLTDQPLPDADHTWYTDGSSLLQEGQRKAGAAVTTETEVIWAKALPAGTSAQRAELIALTQALKMAEGKKLNVYTDSRYAFATAHIHGEIYRRRGWLTSEGKEIKNKDEILALLKALFLPKRLSIIHCPGHQKGHSAEARGNRMADQAARKAAITETPDTSTLLAGKRTADGSEFEKRTADGSEFESPKKKAKVE

SEQ ID NO: 7538 - protein, 2096 aa, synthetic construct
MPAAKRVKLDGGDKKYSIGLDIGTNSVGWAVITDEYKVPSKKFKVLGNTDRHSIKKNLIGALLFDSGETAEATRLKRTARRRYTRRKNRICYLQEIFSNEMAKVDDSFFHRLEESFLVEEDKKHERHPIFGNIVDEVAYHEKYPTIYHLRKKLVDSTDKADLRLIYLALAHMIKFRGHFLIEGDLNPDNSDVDKLFIQLVQTYNQLFEENPINASGVDAKAILSARLSKSRRLENLIAQLPGEKKNGLFGNLIALSLGLTPNFKSNFDLAEDAKLQLSKDTYDDDLDNLLAQIGDQYADLFLAAKNLSDAILLSDILRVNTEITKAPLSASMIKRYDEHHQDLTLLKALVRQQLPEKYKEIFFDQSKNGYAGYIDGGASQEEFYKFIKPILEKMDGTEELLVKLNREDLLRKQRTFDNGSIPHQIHLGELHAILRRQEDFYPFLKDNREKIEKILTFRIPYYVGPLARGNSRFAWMTRKSEETITPWNFEEVVDKGASAQSFIERMTNFDKNLPNEKVLPKHSLLYEYFTVYNELTKVKYVTEGMRKPAFLSGEQKKAIVDLLFKTNRKVTVKQLKEDYFKKIECFDSVEISGVEDRFNASLGTYHDLLKIIKDKDFLDNEENEDILEDIVLTLTLFEDREMIEERLKTYAHLFDDKVMKQLKRRRYTGWGRLSRKLINGIRDKQSGKTILDFLKSDGFANRNFMQLIHDDSLTFKEDIQKAQVSGQGDSLHEHIANLAGSPAIKKGILQTVKVVDELVKVMGRHKPENIVIEMARENQTTQKGQKNSRERMKRIEEGIKELGSQILKEHPVENTQLQNEKLYLYYLQNGRDMYVDQELDINRLSDYDVDHIVPQSFLKDDSIDNKVLTRSDKARGKSDNVPSEEVVKKMKNYWRQLLNAKLITQRKFDNLTKAERGGLSELDKAGFIKRQLVETRQITKHVAQILDSRMNTKYDENDKLIREVKVITLKSKLVSDFRKDFQFYKVREINNYHHAHDAYLNAVVGTALIKKYPKLESEFVYGDYKVYDVRKMIAKSEQEIGKATAKYFFYSNIMNFFKTEITLANGEIRKRPLIETNGETGEIVWDKGRDFATVRKVLSMPQVNIVKKTEVQTGGFSKESILPKRNSDKLIARKKDWDPKKYGGFDSPTVAYSVLVVAKVEKGKSKKLKSVKELLGITIMERSSFEKNPIDFLEAKGYKEVKKDLIIKLPKYSLFELENGRKRMLASAGELQKGNELALPSKYVNFLYLASHYEKLKGSPEDNEQKQLFVEQHKHYLDEIIEQISEFSKRVILADANLDKVLSAYNKHRDKPIREQAENIIHLFTLTNLGAPAAFKYFDTTIDRKRYTSTKEVLDATLIHQSITGLYETRIDLSQLGGDGGPAPGGGEAAAKGGTLNIEDEHRLHETSKEPDVSLGSTWLSDFPQAWAETGGMGLAVRQAPLIIPLKATSTPVSIKQYPMSQEARLGIKPHIQRLLDQGILVPCQSPWNTPLLPVKKPGTNDYRPVQDLREVNKRVEDIHPTVPNPYNLLSGLPPSHQWYTVLDLKDAFFCLRLHPTSQPLFAFEWRDPEMGISGQLTWTRLPQGFKNSPTLFDEALHRDLADFRIQHPDLILLQYVDDLLLAATSELDCQQGTRALLQTLGNLGYRASAKKAQICQKQVKYLGYLLKEGQRWLTEARKETVMGQPTPKTPRQLREFLGTAGFCRLWIPGFAEMAAPLYPLTKTGTLFNWGPDQQKAYQEIKQALLTAPALGLPDLTKPFELFVDEKQGYAKGVLTQKLGPWRRPVAYLSKKLDPVAAGWPPCLRMVAAIAVLTKDAGKLTMGQPLVILAPHAVEALVKQPPDRWLSNARMTHYQALLLDTDRVQFGPVVALNPATLLPLPEEGLQHNCLDILAEAHGTRPDLTDQPLPDADHTWYTDGSSLLQEGQRKAGAAVTTETEVIWAKALPAGTSAQRAELIALTQALKMAEGKKLNVYTDSRYAFATAHIHGEIYRRRGLLTSEGKEIKNKDEILALLKALFLPKRLSIIHCPGHQKGHSAEARGNRMADQAARKAAITETPDTSTLLAGKRTADGSEFEKRTADGSEFESPKKKAKVE

SEQ ID NO: 7539 - protein, 2096 aa, synthetic construct; identical to SEQ ID NO: 7537

SEQ ID NO: 7540 - protein, 2090 aa, synthetic construct
MPAAKRVKLDGGDKKYSIGLDIGTNSVGWAVITDEYKVPSKKFKVLGNTDRHSIKKNLIGALLFDSGETAEATRLKRTARRRYTRRKNRICYLQEIFSNEMAKVDDSFFHRLEESFLVEEDKKHERHPIFGNIVDEVAYHEKYPTIYHLRKKLVDSTDKADLRLIYLALAHMIKFRGHFLIEGDLNPDNSDVDKLFIQLVQTYNQLFEENPINASGVDAKAILSARLSKSRRLENLIAQLPGEKKNGLFGNLIALSLGLTPNFKSNFDLAEDAKLQLSKDTYDDDLDNLLAQIGDQYADLFLAAKNLSDAILLSDILRVNTEITKAPLSASMIKRYDEHHQDLTLLKALVRQQLPEKYKEIFFDQSKNGYAGYIDGGASQEEFYKFIKPILEKMDGTEELLVKLNREDLLRKQRTFDNGSIPHQIHLGELHAILRRQEDFYPFLKDNREKIEKILTFRIPYYVGPLARGNSRFAWMTRKSEETITPWNFEEVVDKGASAQSFIERMTNFDKNLPNEKVLPKHSLLYEYFTVYNELTKVKYVTEGMRKPAFLSGEQKKAIVDLLFKTNRKVTVKQLKEDYFKKIECFDSVEISGVEDRFNASLGTYHDLLKIIKDKDFLDNEENEDILEDIVLTLTLFEDREMIEERLKTYAHLFDDKVMKQLKRRRYTGWGRLSRKLINGIRDKQSGKTILDFLKSDGFANRNFMQLIHDDSLTFKEDIQKAQVSGQGDSLHEHIANLAGSPAIKKGILQTVKVVDELVKVMGRHKPENIVIEMARENQTTQKGQKNSRERMKRIEEGIKELGSQILKEHPVENTQLQNEKLYLYYLQNGRDMYVDQELDINRLSDYDVDHIVPQSFLKDDSIDNKVLTRSDKARGKSDNVPSEEVVKKMKNYWRQLLNAKLITQRKFDNLTKAERGGLSELDKAGFIKRQLVETRQITKHVAQILDSRMNTKYDENDKLIREVKVITLKSKLVSDFRKDFQFYKVREINNYHHAHDAYLNAVVGTALIKKYPKLESEFVYGDYKVYDVRKMIAKSEQEIGKATAKYFFYSNIMNFFKTEITLANGEIRKRPLIETNGETGEIVWDKGRDFATVRKVLSMPQVNIVKKTEVQTGGFSKESILPKRNSDKLIARKKDWDPKKYGGFDSPTVAYSVLVVAKVEKGKSKKLKSVKELLGITIMERSSFEKNPIDFLEAKGYKEVKKDLIIKLPKYSLFELENGRKRMLASAGELQKGNELALPSKYVNFLYLASHYEKLKGSPEDNEQKQLFVEQHKHYLDEIIEQISEFSKRVILADANLDKVLSAYNKHRDKPIREQAENIIHLFTLTNLGAPAAFKYFDTTIDRKRYTSTKEVLDATLIHQSITGLYETRIDLSQLGGDGGPAPGGGEAAAKGGTLQLDDEYRLYSPLVKPDQNIQFWLEQFPQAWAETAGMGLAKQVPPQVIQLKASATPVSVRQYPLSKEAQEGIRPHVQRLIQQGILVPVQSPWNTPLLPVRKPGTNDYRPVQDLREVNKRVQDIHPTVPNPYNLLCALPPQRSWYTVLDLKDAFFCLRLHPTSQPLFAFEWRDPGTGRTGQLTWTRLPQGFKNSPTIFDEALHRDLANFRIQHPQVTLLQYVDDLLLAGATKQDCLEGTKALLLELSDLGYRASAKKAQICRREVTYLGYSLRDGQRWLTEARKKTVVQIPAPTTAKQVREFLGTAGFCRLWIPGFATLAAPLYPLTKEKGEFSWAPEHQKAFDAIKKALLSAPALALPDVTKPFTLYVDERKGVARGVLTQTLGPWRRPVAYLSKKLDPVASGWPVCLKAIAAVAILVKDADKLTLGQNITVIAPHALENIVRQPPDRWMTNARMTHYQSLLLTERVTFAPPAALNPATLLPEETDEPVTHDCHQLLIEETGVRKDLTDIPLTGEVLTWFTDGSSYVVEGKRMAGAAVVDGTRTIWASSLPEGTSAQKAELMALTQALRLAEGKSINIYTDSRYAFATAHVHGAIYKQRGLLTSAGREIKNKEEILSLLEALHLPKRLAIIHCPGHQKAKDPISRGNQMADRVAKQAAQGVNLLAGKRTADGSEFEKRTADGSEFESPKKKAKVE

SEQ ID NO: 7541 - protein, 2090 aa, synthetic construct; identical to SEQ ID NO: 7540

SEQ ID NO: 7542 - protein, 2176 aa, synthetic construct
MPAAKRVKLDGGDKKYSIGLDIGTNSVGWAVITDEYKVPSKKFKVLGNTDRHSIKKNLIGALLFDSGETAEATRLKRTARRRYTRRKNRICYLQEIFSNEMAKVDDSFFHRLEESFLVEEDKKHERHPIFGNIVDEVAYHEKYPTIYHLRKKLVDSTDKADLRLIYLALAHMIKFRGHFLIEGDLNPDNSDVDKLFIQLVQTYNQLFEENPINASGVDAKAILSARLSKSRRLENLIAQLPGEKKNGLFGNLIALSLGLTPNFKSNFDLAEDAKLQLSKDTYDDDLDNLLAQIGDQYADLFLAAKNLSDAILLSDILRVNTEITKAPLSASMIKRYDEHHQDLTLLKALVRQQLPEKYKEIFFDQSKNGYAGYIDGGASQEEFYKFIKPILEKMDGTEELLVKLNREDLLRKQRTFDNGSIPHQIHLGELHAILRRQEDFYPFLKDNREKIEKILTFRIPYYVGPLARGNSRFAWMTRKSEETITPWNFEEVVDKGASAQSFIERMTNFDKNLPNEKVLPKHSLLYEYFTVYNELTKVKYVTEGMRKPAFLSGEQKKAIVDLLFKTNRKVTVKQLKEDYFKKIECFDSVEISGVEDRFNASLGTYHDLLKIIKDKDFLDNEENEDILEDIVLTLTLFEDREMIEERLKTYAHLFDDKVMKQLKRRRYTGWGRLSRKLINGIRDKQSGKTILDFLKSDGFANRNFMQLIHDDSLTFKEDIQKAQVSGQGDSLHEHIANLAGSPAIKKGILQTVKVVDELVKVMGRHKPENIVIEMARENQTTQKGQKNSRERMKRIEEGIKELGSQILKEHPVENTQLQNEKLYLYYLQNGRDMYVDQELDINRLSDYDVDHIVPQSFLKDDSIDNKVLTRSDKARGKSDNVPSEEVVKKMKNYWRQLLNAKLITQRKFDNLTKAERGGLSELDKAGFIKRQLVETRQITKHVAQILDSRMNTKYDENDKLIREVKVITLKSKLVSDFRKDFQFYKVREINNYHHAHDAYLNAVVGTALIKKYPKLESEFVYGDYKVYDVRKMIAKSEQEIGKATAKYFFYSNIMNFFKTEITLANGEIRKRPLIETNGETGEIVWDKGRDFATVRKVLSMPQVNIVKKTEVQTGGFSKESILPKRNSDKLIARKKDWDPKKYGGFDSPTVAYSVLVVAKVEKGKSKKLKSVKELLGITIMERSSFEKNPIDFLEAKGYKEVKKDLIIKLPKYSLFELENGRKRMLASAGELQKGNELALPSKYVNFLYLASHYEKLKGSPEDNEQKQLFVEQHKHYLDEIIEQISEFSKRVILADANLDKVLSAYNKHRDKPIREQAENIIHLFTLTNLGAPAAFKYFDTTIDRKRYTSTKEVLDATLIHQSITGLYETRIDLSQLGGDGGPAPGGGEAAAKGGMDPLQLLQPLEAEIKGTKLKAHWNSGATITCVPEAFLEDERPIQTMLIKTIHGEKQQDVYYLTFKVQGRKVEAEVLASPYDYILLNPSDVPWLMKKPLQLTVLVPLHEYQERLLQQTALPKEQKELLQKLFLKYDALWQHWENQVGHRRIKPHNIATGTLAPRPQKQYPINPKAKPSIQIVIDDLLKQGVLIQQNSTMNTPVYPVPKPDGKWRMVLDYREVNKTIPLIAAQNQHSAGILSSIYRGKYKTTLDLTNGFWAHPITPESYWLTAFTWQGKQYCWTRLPQGFLNSPALFNADVVDLLKEIPNVQAYVDDIYISHDDPQEHLEQLEKIFSILLNAGYVVSLKKSEIAQREVEFLGFNITKEGRGLTDTFKQKLLNITPPKDLKQLQSILGLLNFARNFIPNYSELVKPLYTIVAPANGKFISWTEDNSNQLQHIISVLNQADNLEERNPETRLIIKVNSSPSAGYIRYYNEGSKRPIMYVNYIFSKAEAKFTQTEKLLTTMHKGLIKAMDLAMGQEILVYSPIVSMTKIQRTPLPERKALPVRWITWMTYLEDPRIQFHYDKSLPELQQIPNVTEDVIAKTKHPSEFAMVFYTDGSAIKHPDVNKSHSAGMGIAQVQFIPEYKIVHQWSIPLGDHTAQLAEIAAVEFACKKALKISGPVLIVTDSFYVAESANKELPYWKSNGFLNNKKKPLRHVSKWKSIAECLQLKPDIIIMHEKGHQQPMTTLHTEGNNLADKLATQGSYVVHAGKRTADGSEFEKRTADGSEFESPKKKAKVE

SEQ ID NO: 7543 - protein, 2087 aa, synthetic construct
MPAAKRVKLDGGDKKYSIGLDIGTNSVGWAVITDEYKVPSKKFKVLGNTDRHSIKKNLIGALLFDSGETAEATRLKRTARRRYTRRKNRICYLQEIFSNEMAKVDDSFFHRLEESFLVEEDKKHERHPIFGNIVDEVAYHEKYPTIYHLRKKLVDSTDKADLRLIYLALAHMIKFRGHFLIEGDLNPDNSDVDKLFIQLVQTYNQLFEENPINASGVDAKAILSARLSKSRRLENLIAQLPGEKKNGLFGNLIALSLGLTPNFKSNFDLAEDAKLQLSKDTYDDDLDNLLAQIGDQYADLFLAAKNLSDAILLSDILRVNTEITKAPLSASMIKRYDEHHQDLTLLKALVRQQLPEKYKEIFFDQSKNGYAGYIDGGASQEEFYKFIKPILEKMDGTEELLVKLNREDLLRKQRTFDNGSIPHQIHLGELHAILRRQEDFYPFLKDNREKIEKILTFRIPYYVGPLARGNSRFAWMTRKSEETITPWNFEEVVDKGASAQSFIERMTNFDKNLPNEKVLPKHSLLYEYFTVYNELTKVKYVTEGMRKPAFLSGEQKKAIVDLLFKTNRKVTVKQLKEDYFKKIECFDSVEISGVEDRFNASLGTYHDLLKIIKDKDFLDNEENEDILEDIVLTLTLFEDREMIEERLKTYAHLFDDKVMKQLKRRRYTGWGRLSRKLINGIRDKQSGKTILDFLKSDGFANRNFMQLIHDDSLTFKEDIQKAQVSGQGDSLHEHIANLAGSPAIKKGILQTVKVVDELVKVMGRHKPENIVIEMARENQTTQKGQKNSRERMKRIEEGIKELGSQILKEHPVENTQLQNEKLYLYYLQNGRDMYVDQELDINRLSDYDVDHIVPQSFLKDDSIDNKVLTRSDKARGKSDNVPSEEVVKKMKNYWRQLLNAKLITQRKFDNLTKAERGGLSELDKAGFIKRQLVETRQITKHVAQILDSRMNTKYDENDKLIREVKVITLKSKLVSDFRKDFQFYKVREINNYHHAHDAYLNAVVGTALIKKYPKLESEFVYGDYKVYDVRKMIAKSEQEIGKATAKYFFYSNIMNFFKTEITLANGEIRKRPLIETNGETGEIVWDKGRDFATVRKVLSMPQVNIVKKTEVQTGGFSKESILPKRNSDKLIARKKDWDPKKYGGFDSPTVAYSVLVVAKVEKGKSKKLKSVKELLGITIMERSSFEKNPIDFLEAKGYKEVKKDLIIKLPKYSLFELENGRKRMLASAGELQKGNELALPSKYVNFLYLASHYEKLKGSPEDNEQKQLFVEQHKHYLDEIIEQISEFSKRVILADANLDKVLSAYNKHRDKPIREQAENIIHLFTLTNLGAPAAFKYFDTTIDRKRYTSTKEVLDATLIHQSITGLYETRIDLSQLGGDGGPAPGGGEAAAKGGIPWLMKKPLQLTTLVPLQEYEERLLKQTMLTGSYKEKLQSLFLKYDALWQHWENQVGHRRIKPHHIATGTVNPRPQKQYPINPKAKASIQTVINDLLKQGVLIQQNSIMNTPVYPVPKPDGKWRMVLDYREVNKTIPLIAAQNQHSAGILSSIFRGKYKTTLDLSNGFWAHSITPESYWLTAFTWLGQQYCWTRLPQGFLNSPALFNADVVDLLKEVPNVQVYVDDIYISHDDPREHLEQLEKVFSLLLNAGYVVSLKKSEIAQHEVEFLGFNITKEGRGLTETFKQKLLNITPPRDLKQLQSILGKLNFARNFIPNFSELVKPLYNIIATAPGKYITWTTDNSQQLQNIISMLNSAENLEERNPEVRLIMKVNTSPSAGYIRFYNEFAKRPIMYLNYVYTKAEVKFTNTEKLLTTIHKGLIKALDLGMGQEILVYSPIVSMTKIQKTPLPERKALPIRWITWMSYLEDPRIQFHYDKTLPELQQVPTVTDDIIAKIKHPSEFSMVFYTDGSAIKHPNVNKSHNAGMGIAQVQFKPEFTVINTWSIPLGDHTAQLAEVAAVEFACKKALKIDGPVLIVTDSFYVAESVNKELPYWQSNGFFNNKKKPLKHVSKWKSIADCIQLKPDIIIIHEKGHQPTASTFHTEGNNLADKLATQGSYVVNAGKRTADGSEFEKRTADGSEFESPKKKAKVE

SEQ ID NO: 7544 - protein, 2094 aa, synthetic construct
MPAAKRVKLDGGDKKYSIGLDIGTNSVGWAVITDEYKVPSKKFKVLGNTDRHSIKKNLIGALLFDSGETAEATRLKRTARRRYTRRKNRICYLQEIFSNEMAKVDDSFFHRLEESFLVEEDKKHERHPIFGNIVDEVAYHEKYPTIYHLRKKLVDSTDKADLRLIYLALAHMIKFRGHFLIEGDLNPDNSDVDKLFIQLVQTYNQLFEENPINASGVDAKAILSARLSKSRRLENLIAQLPGEKKNGLFGNLIALSLGLTPNFKSNFDLAEDAKLQLSKDTYDDDLDNLLAQIGDQYADLFLAAKNLSDAILLSDILRVNTEITKAPLSASMIKRYDEHHQDLTLLKALVRQQLPEKYKEIFFDQSKNGYAGYIDGGASQEEFYKFIKPILEKMDGTEELLVKLNREDLLRKQRTFDNGSIPHQIHLGELHAILRRQEDFYPFLKDNREKIEKILTFRIPYYVGPLARGNSRFAWMTRKSEETITPWNFEEVVDKGASAQSFIERMTNFDKNLPNEKVLPKHSLLYEYFTVYNELTKVKYVTEGMRKPAFLSGEQKKAIVDLLFKTNRKVTVKQLKEDYFKKIECFDSVEISGVEDRFNASLGTYHDLLKIIKDKDFLDNEENEDILEDIVLTLTLFEDREMIEERLKTYAHLFDDKVMKQLKRRRYTGWGRLSRKLINGIRDKQSGKTILDFLKSDGFANRNFMQLIHDDSLTFKEDIQKAQVSGQGDSLHEHIANLAGSPAIKKGILQTVKVVDELVKVMGRHKPENIVIEMARENQTTQKGQKNSRERMKRIEEGIKELGSQILKEHPVENTQLQNEKLYLYYLQNGRDMYVDQELDINRLSDYDVDHIVPQSFLKDDSIDNKVLTRSDKARGKSDNVPSEEVVKKMKNYWRQLLNAKLITQRKFDNLTKAERGGLSELDKAGFIKRQLVETRQITKHVAQILDSRMNTKYDENDKLIREVKVITLKSKLVSDFRKDFQFYKVREINNYHHAHDAYLNAVVGTALIKKYPKLESEFVYGDYKVYDVRKMIAKSEQEIGKATAKYFFYSNIMNFFKTEITLANGEIRKRPLIETNGETGEIVWDKGRDFATVRKVLSMPQVNIVKKTEVQTGGFSKESILPKRNSDKLIARKKDWDPKKYGGFDSPTVAYSVLVVAKVEKGKSKKLKSVKELLGITIMERSSFEKNPIDFLEAKGYKEVKKDLIIKLPKYSLFELENGRKRMLASAGELQKGNELALPSKYVNFLYLASHYEKLKGSPEDNEQKQLFVEQHKHYLDEIIEQISEFSKRVILADANLDKVLSAYNKHRDKPIREQAENIIHLFTLTNLGAPAAFKYFDTTIDRKRYTSTKEVLDATLIHQSITGLYETRIDLSQLGGDGGPAPGGGEAAAKGGVLNLEEEYRLHEKPVPSSIDPSWLQLFPTVWAERAGMGLANQVPPVVVELRSGASPVAVRQYPMSKEAREGIRPHIQRFLDLGVLVPCQSPWNTPLLPVKKPGTNDYRPVQDLREINKRVQDIHPTVPNPYNLLSSLPPSHTWYSVLDLKDAFFCLKLHPNSQPLFAFEWRDPEKGNTGQLTWTRLPQGFKNSPTLFNEALHRDLAPFRALNPQVVLLQYVDDLLVAAPTYRDCKEGTQKLLQELSKLGYRVSAKKAQLCQKEVTYLGYLLKEGKRWLTPARKATVMKIPPPTTPRQVREFLGTAGFCRLWIPGFASLAAPLYPLTKPSIPFIWTEEHQKAFDRIKEALLSAPALALPDLTKPFTLYVDERAGVARGVLTQTLGPWRRPVAYLSKKLDPVASGWPTCLKAVAAVALLLKDADKLTLGQNVTVIASHSLESIVRQPPDRWMTNARMTHYQSLLLNERVSFAPPAVLNPATLLPVESEATPVHRCSEILAEETGTRRDLKDQPLPGVPAWYTDGSSFIAEGKRRAGAAIVDGKRTVWASSLPEGTSAQKAELVALTQALRLAEGKDINIYTDSRYAFATAHIHGAIYKQRGWLTSAGKDIKNKEEILALLEAIHLPKRVAIIHCPGHQKGNDPVATGNRRADEAAKQAALSTRVLAETTKPAGKRTADGSEFEKRTADGSEFESPKKKAKVE

SEQ ID NO: 7545 - protein, 2094 aa, synthetic construct
MPAAKRVKLDGGDKKYSIGLDIGTNSVGWAVITDEYKVPSKKFKVLGNTDRHSIKKNLIGALLFDSGETAEATRLKRTARRRYTRRKNRICYLQEIFSNEMAKVDDSFFHRLEESFLVEEDKKHERHPIFGNIVDEVAYHEKYPTIYHLRKKLVDSTDKADLRLIYLALAHMIKFRGHFLIEGDLNPDNSDVDKLFIQLVQTYNQLFEENPINASGVDAKAILSARLSKSRRLENLIAQLPGEKKNGLFGNLIALSLGLTPNFKSNFDLAEDAKLQLSKDTYDDDLDNLLAQIGDQYADLFLAAKNLSDAILLSDILRVNTEITKAPLSASMIKRYDEHHQDLTLLKALVRQQLPEKYKEIFFDQSKNGYAGYIDGGASQEEFYKFIKPILEKMDGTEELLVKLNREDLLRKQRTFDNGSIPHQIHLGELHAILRRQEDFYPFLKDNREKIEKILTFRIPYYVGPLARGNSRFAWMTRKSEETITPWNFEEVVDKGASAQSFIERMTNFDKNLPNEKVLPKHSLLYEYFTVYNELTKVKYVTEGMRKPAFLSGEQKKAIVDLLFKTNRKVTVKQLKEDYFKKIECFDSVEISGVEDRFNASLGTYHDLLKIIKDKDFLDNEENEDILEDIVLTLTLFEDREMIEERLKTYAHLFDDKVMKQLKRRRYTGWGRLSRKLINGIRDKQSGKTILDFLKSDGFANRNFMQLIHDDSLTFKEDIQKAQVSGQGDSLHEHIANLAGSPAIKKGILQTVKVVDELVKVMGRHKPENIVIEMARENQTTQKGQKNSRERMKRIEEGIKELGSQILKEHPVENTQLQNEKLYLYYLQNGRDMYVDQELDINRLSDYDVDHIVPQSFLKDDSIDNKVLTRSDKARGKSDNVPSEEVVKKMKNYWRQLLNAKLITQRKFDNLTKAERGGLSELDKAGFIKRQLVETRQITKHVAQILDSRMNTKYDENDKLIREVKVITLKSKLVSDFRKDFQFYKVREINNYHHAHDAYLNAVVGTALIKKYPKLESEFVYGDYKVYDVRKMIAKSEQEIGKATAKYFFYSNIMNFFKTEITLANGEIRKRPLIETNGETGEIVWDKGRDFATVRKVLSMPQVNIVKKTEVQTGGFSKESILPKRNSDKLIARKKDWDPKKYGGFDSPTVAYSVLVVAKVEKGKSKKLKSVKELLGITIMERSSFEKNPIDFLEAKGYKEVKKDLIIKLPKYSLFELENGRKRMLASAGELQKGNELALPSKYVNFLYLASHYEKLKGSPEDNEQKQLFVEQHKHYLDEIIEQISEFSKRVILADANLDKVLSAYNKHRDKPIREQAENIIHLFTLTNLGAPAAFKYFDTTIDRKRYTSTKEVLDATLIHQSITGLYETRIDLSQLGGDGGPAPGGGEAAAKGGVLNLEEEYRLHEKPVPSSIDPSWLQLFPTVWAERAGMGLANQVPPVVVELRSGASPVAVRQYPMSKEAREGIRPHIQRFLDLGVLVPCQSPWNTPLLPVKKPGTNDYRPVQDLREINKRVQDIHPTVPNPYNLLSSLPPSHTWYSVLDLKDAFFCLKLHPNSQPLFAFEWRDPEKGNTGQLTWTRLPQGFKNSPTLFNEALHRDLAPFRALNPQVVLLQYVDDLLVAAPTYRDCKEGTQKLLQELSKLGYRVSAKKAQLCQKEVTYLGYLLKEGKRWLTPARKATVMKIPPPTTPRQVREFLGKAGFCRLFIPGFASLAAPLYPLTKPSIPFIWTEEHQKAFDRIKEALLSAPALALPDLTKPFTLYVDERAGVARGVLTQTLGPWRRPVAYLSKKLDPVASGWPTCLKAVAAVALLLKDADKLTLGQNVTVIASHSLESIVRQPPDRWMTNARMTHYQSLLLNERVSFAPPAVLNPATLLPVESEATPVHRCSEILAEETGTRRDLKDQPLPGVPAWYTDGSSFIAEGKRRAGAAIVDGKRTVWASSLPEGTSAQKAELVALTQALRLAEGKDINIYTDSRYAFATAHIHGAIYKQRGWLTSAGKDIKNKEEILALLEAIHLPKRVAIIHCPGHQKGNDPVATGNRRADEAAKQAALSTRVLAETTKPAGKRTADGSEFEKRTADGSEFESPKKKAKVE

SEQ ID NO: 7546 - protein, 2096 aa, synthetic construct
MPAAKRVKLDGGDKKYSIGLDIGTNSVGWAVITDEYKVPSKKFKVLGNTDRHSIKKNLIGALLFDSGETAEATRLKRTARRRYTRRKNRICYLQEIFSNEMAKVDDSFFHRLEESFLVEEDKKHERHPIFGNIVDEVAYHEKYPTIYHLRKKLVDSTDKADLRLIYLALAHMIKFRGHFLIEGDLNPDNSDVDKLFIQLVQTYNQLFEENPINASGVDAKAILSARLSKSRRLENLIAQLPGEKKNGLFGNLIALSLGLTPNFKSNFDLAEDAKLQLSKDTYDDDLDNLLAQIGDQYADLFLAAKNLSDAILLSDILRVNTEITKAPLSASMIKRYDEHHQDLTLLKALVRQQLPEKYKEIFFDQSKNGYAGYIDGGASQEEFYKFIKPILEKMDGTEELLVKLNREDLLRKQRTFDNGSIPHQIHLGELHAILRRQEDFYPFLKDNREKIEKILTFRIPYYVGPLARGNSRFAWMTRKSEETITPWNFEEVVDKGASAQSFIERMTNFDKNLPNEKVLPKHSLLYEYFTVYNELTKVKYVTEGMRKPAFLSGEQKKAIVDLLFKTNRKVTVKQLKEDYFKKIECFDSVEISGVEDRFNASLGTYHDLLKIIKDKDFLDNEENEDILEDIVLTLTLFEDREMIEERLKTYAHLFDDKVMKQLKRRRYTGWGRLSRKLINGIRDKQSGKTILDFLKSDGFANRNFMQLIHDDSLTFKEDIQKAQVSGQGDSLHEHIANLAGSPAIKKGILQTVKVVDELVKVMGRHKPENIVIEMARENQTTQKGQKNSRERMKRIEEGIKELGSQILKEHPVENTQLQNEKLYLYYLQNGRDMYVDQELDINRLSDYDVDHIVPQSFLKDDSIDNKVLTRSDKARGKSDNVPSEEVVKKMKNYWRQLLNAKLITQRKFDNLTKAERGGLSELDKAGFIKRQLVETRQITKHVAQILDSRMNTKYDENDKLIREVKVITLKSKLVSDFRKDFQFYKVREINNYHHAHDAYLNAVVGTALIKKYPKLESEFVYGDYKVYDVRKMIAKSEQEIGKATAKYFFYSNIMNFFKTEITLANGEIRKRPLIETNGETGEIVWDKGRDFATVRKVLSMPQVNIVKKTEVQTGGFSKESILPKRNSDKLIARKKDWDPKKYGGFDSPTVAYSVLVVAKVEKGKSKKLKSVKELLGITIMERSSFEKNPIDFLEAKGYKEVKKDLIIKLPKYSLFELENGRKRMLASAGELQKGNELALPSKYVNFLYLASHYEKLKGSPEDNEQKQLFVEQHKHYLDEIIEQISEFSKRVILADANLDKVLSAYNKHRDKPIREQAENIIHLFTLTNLGAPAAFKYFDTTIDRKRYTSTKEVLDATLIHQSITGLYETRIDLSQLGGDGGPAPGGGEAAAKGGTLNIEDEYRLHETSKEPDVPLGSTWLSDFPQAWAETGGMGLAVRQAPLIIPLKATSTPVSIKQYPMSQEARLGIKPHIQRLLDQGILVPCQSPWNTPLLPVKKPGTNDYRPVQDLREVNKRVEDIHPTVPNPYNLLSGLPPSHQWYTVLDLKDAFFCLRLHPTSQPLFAFEWRDPEMGISGQLTWTRLPQGFKNSPTLFNEALHRDLADFRIQHPDLILLQYVDDLLLAATSEQDCQRGTRALLQTLGNLGYRASAKKAQICQKQVKYLGYLLKEGQRWLTEARKETVMGQPTPKTPRQLREFLGTAGFCRLWIPGFAEMAAPLYPLTKPGTLFNWGPDQQKAYQEIKQALLTAPALGLPDLTKPFELFVDEKQGYAKGVLTQKLGPWRRPVAYLSKKLDPVAAGWPPCLRMVAAIAVLTKDAGKLTMGQPLVILAPHAVEALVKQPPDRWLSNARMTHYQAMLLDTDRVQFGPVVALNPATLLPLPEKEAPHDCLEILAETHGTRPDLTDQPIPDADYTWYTDGSSFLQEGQRRAGAAVTTETEVIWARALPAGTSAQRAELIALTQALKMAEGKKLNVYTDSRYAFATAHVHGEIYRRRGWLTSEGREIKNKNEILALLKALFLPKRLSIIHCPGHQKGNSAEARGNRMADQAAREAAMKAVLETSTLLAGKRTADGSEFEKRTADGSEFESPKKKAKVE

SEQ ID NO: 7547 - protein, 2096 aa, synthetic construct
MPAAKRVKLDGGDKKYSIGLDIGTNSVGWAVITDEYKVPSKKFKVLGNTDRHSIKKNLIGALLFDSGETAEATRLKRTARRRYTRRKNRICYLQEIFSNEMAKVDDSFFHRLEESFLVEEDKKHERHPIFGNIVDEVAYHEKYPTIYHLRKKLVDSTDKADLRLIYLALAHMIKFRGHFLIEGDLNPDNSDVDKLFIQLVQTYNQLFEENPINASGVDAKAILSARLSKSRRLENLIAQLPGEKKNGLFGNLIALSLGLTPNFKSNFDLAEDAKLQLSKDTYDDDLDNLLAQIGDQYADLFLAAKNLSDAILLSDILRVNTEITKAPLSASMIKRYDEHHQDLTLLKALVRQQLPEKYKEIFFDQSKNGYAGYIDGGASQEEFYKFIKPILEKMDGTEELLVKLNREDLLRKQRTFDNGSIPHQIHLGELHAILRRQEDFYPFLKDNREKIEKILTFRIPYYVGPLARGNSRFAWMTRKSEETITPWNFEEVVDKGASAQSFIERMTNFDKNLPNEKVLPKHSLLYEYFTVYNELTKVKYVTEGMRKPAFLSGEQKKAIVDLLFKTNRKVTVKQLKEDYFKKIECFDSVEISGVEDRFNASLGTYHDLLKIIKDKDFLDNEENEDILEDIVLTLTLFEDREMIEERLKTYAHLFDDKVMKQLKRRRYTGWGRLSRKLINGIRDKQSGKTILDFLKSDGFANRNFMQLIHDDSLTFKEDIQKAQVSGQGDSLHEHIANLAGSPAIKKGILQTVKVVDELVKVMGRHKPENIVIEMARENQTTQKGQKNSRERMKRIEEGIKELGSQILKEHPVENTQLQNEKLYLYYLQNGRDMYVDQELDINRLSDYDVDHIVPQSFLKDDSIDNKVLTRSDKARGKSDNVPSEEVVKKMKNYWRQLLNAKLITQRKFDNLTKAERGGLSELDKAGFIKRQLVETRQITKHVAQILDSRMNTKYDENDKLIREVKVITLKSKLVSDFRKDFQFYKVREINNYHHAHDAYLNAVVGTALIKKYPKLESEFVYGDYKVYDVRKMIAKSEQEIGKATAKYFFYSNIMNFFKTEITLANGEIRKRPLIETNGETGEIVWDKGRDFATVRKVLSMPQVNIVKKTEVQTGGFSKESILPKRNSDKLIARKKDWDPKKYGGFDSPTVAYSVLVVAKVEKGKSKKLKSVKELLGITIMERSSFEKNPIDFLEAKGYKEVKKDLIIKLPKYSLFELENGRKRMLASAGELQKGNELALPSKYVNFLYLASHYEKLKGSPEDNEQKQLFVEQHKHYLDEIIEQISEFSKRVILADANLDKVLSAYNKHRDKPIREQAENIIHLFTLTNLGAPAAFKYFDTTIDRKRYTSTKEVLDATLIHQSITGLYETRIDLSQLGGDGGPAPGGGEAAAKGGTLNIEDEYRLHETSKEPDVPLGSTWLSDFPQAWAETGGMGLAVRQAPLIIPLKATSTPVSIKQYPMSQEARLGIKPHIQRLLDQGILVPCQSPWNTPLLPVKKPGTNDYRPVQDLREVNKRVEDIHPTVPNPYNLLSGLPPSHQWYTVLDLKDAFFCLRLHPTSQPLFAFEWRDPEMGISGQLTWTRLPQGFKNSPTLFNEALHRDLADFRIQHPDLILLQYVDDLLLAATSEQDCQRGTRALLQTLGNLGYRASAKKAQICQKQVKYLGYLLKEGQRWLTEARKETVMGQPTPKTPRQLREFLGKAGFCRLFIPGFAEMAAPLYPLTKPGTLFNWGPDQQKAYQEIKQALLTAPALGLPDLTKPFELFVDEKQGYAKGVLTQKLGPWRRPVAYLSKKLDPVAAGWPPCLRMVAAIAVLTKDAGKLTMGQPLVILAPHAVEALVKQPPDRWLSNARMTHYQAMLLDTDRVQFGPVVALNPATLLPLPEKEAPHDCLEILAETHGTRPDLTDQPIPDADYTWYTDGSSFLQEGQRRAGAAVTTETEVIWARALPAGTSAQRAELIALTQALKMAEGKKLNVYTDSRYAFATAHVHGEIYRRRGWLTSEGREIKNKNEILALLKALFLPKRLSIIHCPGHQKGNSAEARGNRMADQAAREAAMKAVLETSTLLAGKRTADGSEFEKRTADGSEFESPKKKAKVE

SEQ ID NO: 7548 - protein, 2173 aa, synthetic construct
MPAAKRVKLDGGDKKYSIGLDIGTNSVGWAVITDEYKVPSKKFKVLGNTDRHSIKKNLIGALLFDSGETAEATRLKRTARRRYTRRKNRICYLQEIFSNEMAKVDDSFFHRLEESFLVEEDKKHERHPIFGNIVDEVAYHEKYPTIYHLRKKLVDSTDKADLRLIYLALAHMIKFRGHFLIEGDLNPDNSDVDKLFIQLVQTYNQLFEENPINASGVDAKAILSARLSKSRRLENLIAQLPGEKKNGLFGNLIALSLGLTPNFKSNFDLAEDAKLQLSKDTYDDDLDNLLAQIGDQYADLFLAAKNLSDAILLSDILRVNTEITKAPLSASMIKRYDEHHQDLTLLKALVRQQLPEKYKEIFFDQSKNGYAGYIDGGASQEEFYKFIKPILEKMDGTEELLVKLNREDLLRKQRTFDNGSIPHQIHLGELHAILRRQEDFYPFLKDNREKIEKILTFRIPYYVGPLARGNSRFAWMTRKSEETITPWNFEEVVDKGASAQSFIERMTNFDKNLPNEKVLPKHSLLYEYFTVYNELTKVKYVTEGMRKPAFLSGEQKKAIVDLLFKTNRKVTVKQLKEDYFKKIECFDSVEISGVEDRFNASLGTYHDLLKIIKDKDFLDNEENEDILEDIVLTLTLFEDREMIEERLKTYAHLFDDKVMKQLKRRRYTGWGRLSRKLINGIRDKQSGKTILDFLKSDGFANRNFMQLIHDDSLTFKEDIQKAQVSGQGDSLHEHIANLAGSPAIKKGILQTVKVVDELVKVMGRHKPENIVIEMARENQTTQKGQKNSRERMKRIEEGIKELGSQILKEHPVENTQLQNEKLYLYYLQNGRDMYVDQELDINRLSDYDVDHIVPQSFLKDDSIDNKVLTRSDKARGKSDNVPSEEVVKKMKNYWRQLLNAKLITQRKFDNLTKAERGGLSELDKAGFIKRQLVETRQITKHVAQILDSRMNTKYDENDKLIREVKVITLKSKLVSDFRKDFQFYKVREINNYHHAHDAYLNAVVGTALIKKYPKLESEFVYGDYKVYDVRKMIAKSEQEIGKATAKYFFYSNIMNFFKTEITLANGEIRKRPLIETNGETGEIVWDKGRDFATVRKVLSMPQVNIVKKTEVQTGGFSKESILPKRNSDKLIARKKDWDPKKYGGFDSPTVAYSVLVVAKVEKGKSKKLKSVKELLGITIMERSSFEKNPIDFLEAKGYKEVKKDLIIKLPKYSLFELENGRKRMLASAGELQKGNELALPSKYVNFLYLASHYEKLKGSPEDNEQKQLFVEQHKHYLDEIIEQISEFSKRVILADANLDKVLSAYNKHRDKPIREQAENIIHLFTLTNLGAPAAFKYFDTTIDRKRYTSTKEVLDATLIHQSITGLYETRIDLSQLGGDGGPAPEAAAKGGGGGMDLLKPLTVERKGVKIKGYWNSQADITCVPKDLLQGEEPVRQQNVTTIHGTQEGDVYYVNLKIDGRRINTEVIGTTLDYAIITPGDVPWILKKPLELTIKLDLEEQQGTLLNNSILSKKGKEELKQLFEKYSALWQSWENQVGHRRIRPHKIATGTVKPTPQKQYHINPKAKPDIQIVINDLLKQGVLIQKESTMNTPVYPVPKPNGRWRMVLDYRAVNKVTPLIAVQNQHSYGILGSLFKGRYKTTIDLSNGFWAHPIVPEDYWITAFTWQGKQYCWTVLPQGFLNSPGLFTGDVVDLLQGIPNVEVYVDDVYISHDSEKEHLEYLDILFNRLKEAGYIISLKKSNIANSIVDFLGFQITNEGRGLTDTFKEKLENITAPTTLKQLQSILGLLNFARNFIPDFTELIAPLYALIPKSTKNYVPWQIEHSTTLETLITKLNGAEYLQGRKGDKTLIMKVNASYTTGYIRYYNEGEKKPISYVSIVFSKTELKFTELEKLLTTVHKGLLKALDLSMGQNIHVYSPIVSMQNIQKTPQTAKKALASRWLSWLSYLEDPRIRFFYDPQMPALKDLPAVDTGKDNKKHPSNFQHIFYTDGSAITSPTKEGHLNAGMGIVYFINKDGNLQKQQEWSISLGNHTAQFAEIAAFEFALKKCLPLGGNILVVTDSNYVAKAYNEELDVWASNGFVNNRKKPLKHISKWKSVADLKRLRPDVVVTHEPGHQKLDSSPHAYGNNLADQLATQASFKVHAGKRTADGSEFEKRTADGSEFESPKKKAKVE

SEQ ID NO: 7549 - protein, 2087 aa, synthetic construct
MPAAKRVKLDGGDKKYSIGLDIGTNSVGWAVITDEYKVPSKKFKVLGNTDRHSIKKNLIGALLFDSGETAEATRLKRTARRRYTRRKNRICYLQEIFSNEMAKVDDSFFHRLEESFLVEEDKKHERHPIFGNIVDEVAYHEKYPTIYHLRKKLVDSTDKADLRLIYLALAHMIKFRGHFLIEGDLNPDNSDVDKLFIQLVQTYNQLFEENPINASGVDAKAILSARLSKSRRLENLIAQLPGEKKNGLFGNLIALSLGLTPNFKSNFDLAEDAKLQLSKDTYDDDLDNLLAQIGDQYADLFLAAKNLSDAILLSDILRVNTEITKAPLSASMIKRYDEHHQDLTLLKALVRQQLPEKYKEIFFDQSKNGYAGYIDGGASQEEFYKFIKPILEKMDGTEELLVKLNREDLLRKQRTFDNGSIPHQIHLGELHAILRRQEDFYPFLKDNREKIEKILTFRIPYYVGPLARGNSRFAWMTRKSEETITPWNFEEVVDKGASAQSFIERMTNFDKNLPNEKVLPKHSLLYEYFTVYNELTKVKYVTEGMRKPAFLSGEQKKAIVDLLFKTNRKVTVKQLKEDYFKKIECFDSVEISGVEDRFNASLGTYHDLLKIIKDKDFLDNEENEDILEDIVLTLTLFEDREMIEERLKTYAHLFDDKVMKQLKRRRYTGWGRLSRKLINGIRDKQSGKTILDFLKSDGFANRNFMQLIHDDSLTFKEDIQKAQVSGQGDSLHEHIANLAGSPAIKKGILQTVKVVDELVKVMGRHKPENIVIEMARENQTTQKGQKNSRERMKRIEEGIKELGSQILKEHPVENTQLQNEKLYLYYLQNGRDMYVDQELDINRLSDYDVDHIVPQSFLKDDSIDNKVLTRSDKARGKSDNVPSEEVVKKMKNYWRQLLNAKLITQRKFDNLTKAERGGLSELDKAGFIKRQLVETRQITKHVAQILDSRMNTKYDENDKLIREVKVITLKSKLVSDFRKDFQFYKVREINNYHHAHDAYLNAVVGTALIKKYPKLESEFVYGDYKVYDVRKMIAKSEQEIGKATAKYFFYSNIMNFFKTEITLANGEIRKRPLIETNGETGEIVWDKGRDFATVRKVLSMPQVNIVKKTEVQTGGFSKESILPKRNSDKLIARKKDWDPKKYGGFDSPTVAYSVLVVAKVEKGKSKKLKSVKELLGITIMERSSFEKNPIDFLEAKGYKEVKKDLIIKLPKYSLFELENGRKRMLASAGELQKGNELALPSKYVNFLYLASHYEKLKGSPEDNEQKQLFVEQHKHYLDEIIEQISEFSKRVILADANLDKVLSAYNKHRDKPIREQAENIIHLFTLTNLGAPAAFKYFDTTIDRKRYTSTKEVLDATLIHQSITGLYETRIDLSQLGGDGGPAPEAAAKGGGGGVPWILKKPLELTIKLDLEEQQGTLLNNSILSKKGKEELKQLFEKYSALWQSWENQVGHRRIRPHKIATGTVKPTPQKQYHINPKAKPDIQIVINDLLKQGVLIQKESTMNTPVYPVPKPNGRWRMVLDYRAVNKVTPLIAVQNQHSYGILGSLFKGRYKTTIDLSNGFWAHPIVPEDYWITAFTWQGKQYCWTVLPQGFLNSPGLFTGDVVDLLQGIPNVEVYVDDVYISHDSEKEHLEYLDILFNRLKEAGYIISLKKSNIANSIVDFLGFQITNEGRGLTDTFKEKLENITAPTTLKQLQSILGLLNFARNFIPDFTELIAPLYALIPKSTKNYVPWQIEHSTTLETLITKLNGAEYLQGRKGDKTLIMKVNASYTTGYIRYYNEGEKKPISYVSIVFSKTELKFTELEKLLTTVHKGLLKALDLSMGQNIHVYSPIVSMQNIQKTPQTAKKALASRWLSWLSYLEDPRIRFFYDPQMPALKDLPAVDTGKDNKKHPSNFQHIFYTDGSAITSPTKEGHLNAGMGIVYFINKDGNLQKQQEWSISLGNHTAQFAEIAAFEFALKKCLPLGGNILVVTDSNYVAKAYNEELDVWASNGFVNNRKKPLKHISKWKSVADLKRLRPDVVVTHEPGHQKLDSSPHAYGNNLADQLATQASFKVHAGKRTADGSEFEKRTADGSEFESPKKKAKVE

SEQ ID NO: 7550 - protein, 2095 aa, synthetic construct
MPAAKRVKLDGGDKKYSIGLDIGTNSVGWAVITDEYKVPSKKFKVLGNTDRHSIKKNLIGALLFDSGETAEATRLKRTARRRYTRRKNRICYLQEIFSNEMAKVDDSFFHRLEESFLVEEDKKHERHPIFGNIVDEVAYHEKYPTIYHLRKKLVDSTDKADLRLIYLALAHMIKFRGHFLIEGDLNPDNSDVDKLFIQLVQTYNQLFEENPINASGVDAKAILSARLSKSRRLENLIAQLPGEKKNGLFGNLIALSLGLTPNFKSNFDLAEDAKLQLSKDTYDDDLDNLLAQIGDQYADLFLAAKNLSDAILLSDILRVNTEITKAPLSASMIKRYDEHHQDLTLLKALVRQQLPEKYKEIFFDQSKNGYAGYIDGGASQEEFYKFIKPILEKMDGTEELLVKLNREDLLRKQRTFDNGSIPHQIHLGELHAILRRQEDFYPFLKDNREKIEKILTFRIPYYVGPLARGNSRFAWMTRKSEETITPWNFEEVVDKGASAQSFIERMTNFDKNLPNEKVLPKHSLLYEYFTVYNELTKVKYVTEGMRKPAFLSGEQKKAIVDLLFKTNRKVTVKQLKEDYFKKIECFDSVEISGVEDRFNASLGTYHDLLKIIKDKDFLDNEENEDILEDIVLTLTLFEDREMIEERLKTYAHLFDDKVMKQLKRRRYTGWGRLSRKLINGIRDKQSGKTILDFLKSDGFANRNFMQLIHDDSLTFKEDIQKAQVSGQGDSLHEHIANLAGSPAIKKGILQTVKVVDELVKVMGRHKPENIVIEMARENQTTQKGQKNSRERMKRIEEGIKELGSQILKEHPVENTQLQNEKLYLYYLQNGRDMYVDQELDINRLSDYDVDHIVPQSFLKDDSIDNKVLTRSDKARGKSDNVPSEEVVKKMKNYWRQLLNAKLITQRKFDNLTKAERGGLSELDKAGFIKRQLVETRQITKHVAQILDSRMNTKYDENDKLIREVKVITLKSKLVSDFRKDFQFYKVREINNYHHAHDAYLNAVVGTALIKKYPKLESEFVYGDYKVYDVRKMIAKSEQEIGKATAKYFFYSNIMNFFKTEITLANGEIRKRPLIETNGETGEIVWDKGRDFATVRKVLSMPQVNIVKKTEVQTGGFSKESILPKRNSDKLIARKKDWDPKKYGGFDSPTVAYSVLVVAKVEKGKSKKLKSVKELLGITIMERSSFEKNPIDFLEAKGYKEVKKDLIIKLPKYSLFELENGRKRMLASAGELQKGNELALPSKYVNFLYLASHYEKLKGSPEDNEQKQLFVEQHKHYLDEIIEQISEFSKRVILADANLDKVLSAYNKHRDKPIREQAENIIHLFTLTNLGAPAAFKYFDTTIDRKRYTSTKEVLDATLIHQSITGLYETRIDLSQLGGDGGPAPEAAAKGGGGGTLQLEEEYRLFEPESTQKQEMDIWLKNFPQAWAETGGMGTAHCQAPVLIQLKATATPISIRQYPMPHEAYQGIKPHIRRMLDQGILKPCQSPWNTPLLPVKKPGTEDYRPVQDLREVNKRVEDIHPTVPNPYNLLSTLPPSHPWYTVLDLKDAFFCLRLHSESQLLFAFEWRDPEIGLSGQLTWTRLPQGFKNSPTLFNEALHSDLADFRVRYPALVLLQYVDDLLLAAATRTECLEGTKALLETLGNKGYRASAKKAQICLQEVTYLGYSLKDGQRWLTKARKEAILSIPVPKNSRQVREFLGTAGYCRLWIPGFAELAAPLYPLTRPGTLFQWGTEQQLAFEDIKKALLSSPALGLPDITKPFELFIDENSGFAKGVLVQKLGPWKRPVAYLSKKLDTVASGWPPCLRMVAAIAILVKDAGKLTLGQPLTILTSHPVEALVRQPPNKWLSNARMTHYQAMLLDAERVHFGPTVSLNPATLLPLPSGGNHHDCLQILAETHGTRPDLTDQPLPDADLTWYTDGSSFIRNGEREAGAAVTTESEVIWAAPLPPGTSAQRAELIALTQALKMAEGKKLTVYTDSRYAFATTHVHGEIYRRRGWLTSEGKEIKNKNEILALLEALFLPKRLSIIHCPGHQKGDSPQAKGNRLADDTAKKAATETHSSLTVLPAGKRTADGSEFEKRTADGSEFESPKKKAKVE

SEQ ID NO: 7551 - protein, 2087 aa, synthetic construct
MPAAKRVKLDGGDKKYSIGLDIGTNSVGWAVITDEYKVPSKKFKVLGNTDRHSIKKNLIGALLFDSGETAEATRLKRTARRRYTRRKNRICYLQEIFSNEMAKVDDSFFHRLEESFLVEEDKKHERHPIFGNIVDEVAYHEKYPTIYHLRKKLVDSTDKADLRLIYLALAHMIKFRGHFLIEGDLNPDNSDVDKLFIQLVQTYNQLFEENPINASGVDAKAILSARLSKSRRLENLIAQLPGEKKNGLFGNLIALSLGLTPNFKSNFDLAEDAKLQLSKDTYDDDLDNLLAQIGDQYADLFLAAKNLSDAILLSDILRVNTEITKAPLSASMIKRYDEHHQDLTLLKALVRQQLPEKYKEIFFDQSKNGYAGYIDGGASQEEFYKFIKPILEKMDGTEELLVKLNREDLLRKQRTFDNGSIPHQIHLGELHAILRRQEDFYPFLKDNREKIEKILTFRIPYYVGPLARGNSRFAWMTRKSEETITPWNFEEVVDKGASAQSFIERMTNFDKNLPNEKVLPKHSLLYEYFTVYNELTKVKYVTEGMRKPAFLSGEQKKAIVDLLFKTNRKVTVKQLKEDYFKKIECFDSVEISGVEDRFNASLGTYHDLLKIIKDKDFLDNEENEDILEDIVLTLTLFEDREMIEERLKTYAHLFDDKVMKQLKRRRYTGWGRLSRKLINGIRDKQSGKTILDFLKSDGFANRNFMQLIHDDSLTFKEDIQKAQVSGQGDSLHEHIANLAGSPAIKKGILQTVKVVDELVKVMGRHKPENIVIEMARENQTTQKGQKNSRERMKRIEEGIKELGSQILKEHPVENTQLQNEKLYLYYLQNGRDMYVDQELDINRLSDYDVDHIVPQSFLKDDSIDNKVLTRSDKARGKSDNVPSEEVVKKMKNYWRQLLNAKLITQRKFDNLTKAERGGLSELDKAGFIKRQLVETRQITKHVAQILDSRMNTKYDENDKLIREVKVITLKSKLVSDFRKDFQFYKVREINNYHHAHDAYLNAVVGTALIKKYPKLESEFVYGDYKVYDVRKMIAKSEQEIGKATAKYFFYSNIMNFFKTEITLANGEIRKRPLIETNGETGEIVWDKGRDFATVRKVLSMPQVNIVKKTEVQTGGFSKESILPKRNSDKLIARKKDWDPKKYGGFDSPTVAYSVLVVAKVEKGKSKKLKSVKELLGITIMERSSFEKNPIDFLEAKGYKEVKKDLIIKLPKYSLFELENGRKRMLASAGELQKGNELALPSKYVNFLYLASHYEKLKGSPEDNEQKQLFVEQHKHYLDEIIEQISEFSKRVILADANLDKVLSAYNKHRDKPIREQAENIIHLFTLTNLGAPAAFKYFDTTIDRKRYTSTKEVLDATLIHQSITGLYETRIDLSQLGGDGGPAPEAAAKGGGGGVPWLTQQPLQLTILVPLQEYQEKILSKTALPEDQKQQLKTLFVKYDNLWQHWENQVGHRKIRPHNIATGDYPPRPQKQYPINPKAKPSIQIVIDDLLKQGVLTPQNSTMNTPVYPVPKPDGRWRMVLDYREVNKTIPLTAAQNQHSAGILATIVRQKYKTTLDLANGFWAHPITPESYWLTAFTWQGKQYCWTRLPQGFLNSPALFNADVVDLLKEIPNVQVYVDDIYLSHDDPKEHVQQLEKVFQILLQAGYVVSLKKSEIGQKTVEFLGFNITKEGRGLTDTFKTKLLNITPPKDLKQLQSILGKLNFARNFIPNFAELVQPLYNLIAPAKGKYIEWSEENTKQLNMVIEALNTASNLEERLPEQRLVIKVNTSPSAGYVRYYNETGKKPIMYLNYVFSKAELKFSMLEKLLTTMHKALIKAMDLAMGQEILVYSPIVSMTKIQKTPLPERKALPIRWITWMTYLEDPRIQFHYDKTLPELKHIPDVYTSSQSPVKHPSQYEGVFYTDGSAIKSPDPTKSNNAGMGIVHATYKPEYQVLNQWSIPLGNHTAQMAEIAAVEFACKKALKIPGPVLVITDSFYVAESANKELPYWKSNGFVNNKKKPLKHISKWKSIAECLSMKPDITIQHEKGISLQIPVFILKGNALADKLATQGSYVVNAGKRTADGSEFEKRTADGSEFESPKKKAKVE

SEQ ID NO: 7552 - protein, 2176 aa, synthetic construct
MPAAKRVKLDGGDKKYSIGLDIGTNSVGWAVITDEYKVPSKKFKVLGNTDRHSIKKNLIGALLFDSGETAEATRLKRTARRRYTRRKNRICYLQEIFSNEMAKVDDSFFHRLEESFLVEEDKKHERHPIFGNIVDEVAYHEKYPTIYHLRKKLVDSTDKADLRLIYLALAHMIKFRGHFLIEGDLNPDNSDVDKLFIQLVQTYNQLFEENPINASGVDAKAILSARLSKSRRLENLIAQLPGEKKNGLFGNLIALSLGLTPNFKSNFDLAEDAKLQLSKDTYDDDLDNLLAQIGDQYADLFLAAKNLSDAILLSDILRVNTEITKAPLSASMIKRYDEHHQDLTLLKALVRQQLPEKYKEIFFDQSKNGYAGYIDGGASQEEFYKFIKPILEKMDGTEELLVKLNREDLLRKQRTFDNGSIPHQIHLGELHAILRRQEDFYPFLKDNREKIEKILTFRIPYYVGPLARGNSRFAWMTRKSEETITPWNFEEVVDKGASAQSFIERMTNFDKNLPNEKVLPKHSLLYEYFTVYNELTKVKYVTEGMRKPAFLSGEQKKAIVDLLFKTNRKVTVKQLKEDYFKKIECFDSVEISGVEDRFNASLGTYHDLLKIIKDKDFLDNEENEDILEDIVLTLTLFEDREMIEERLKTYAHLFDDKVMKQLKRRRYTGWGRLSRKLINGIRDKQSGKTILDFLKSDGFANRNFMQLIHDDSLTFKEDIQKAQVSGQGDSLHEHIANLAGSPAIKKGILQTVKVVDELVKVMGRHKPENIVIEMARENQTTQKGQKNSRERMKRIEEGIKELGSQILKEHPVENTQLQNEKLYLYYLQNGRDMYVDQELDINRLSDYDVDHIVPQSFLKDDSIDNKVLTRSDKARGKSDNVPSEEVVKKMKNYWRQLLNAKLITQRKFDNLTKAERGGLSELDKAGFIKRQLVETRQITKHVAQILDSRMNTKYDENDKLIREVKVITLKSKLVSDFRKDFQFYKVREINNYHHAHDAYLNAVVGTALIKKYPKLESEFVYGDYKVYDVRKMIAKSEQEIGKATAKYFFYSNIMNFFKTEITLANGEIRKRPLIETNGETGEIVWDKGRDFATVRKVLSMPQVNIVKKTEVQTGGFSKESILPKRNSDKLIARKKDWDPKKYGGFDSPTVAYSVLVVAKVEKGKSKKLKSVKELLGITIMERSSFEKNPIDFLEAKGYKEVKKDLIIKLPKYSLFELENGRKRMLASAGELQKGNELALPSKYVNFLYLASHYEKLKGSPEDNEQKQLFVEQHKHYLDEIIEQISEFSKRVILADANLDKVLSAYNKHRDKPIREQAENIIHLFTLTNLGAPAAFKYFDTTIDRKRYTSTKEVLDATLIHQSITGLYETRIDLSQLGGDGGPAPEAAAKGGGGGMNPLQLLQPLPAEIKGTKLLAHWNSGATITCIPESFLEDEQPIKKTLIKTIHGEKQQNVYYVTFKVKGRKVEAEVIASPYEYILLSPTDVPWLTQQPLQLTILVPLQEYQEKILSKTALPEDQKQQLKTLFVKYDNLWQHWENQVGHRKIRPHNIATGDYPPRPQKQYPINPKAKPSIQIVIDDLLKQGVLTPQNSTMNTPVYPVPKPDGRWRMVLDYREVNKTIPLTAAQNQHSAGILATIVRQKYKTTLDLANGFWAHPITPESYWLTAFTWQGKQYCWTRLPQGFLNSPALFNADVVDLLKEIPNVQVYVDDIYLSHDDPKEHVQQLEKVFQILLQAGYVVSLKKSEIGQKTVEFLGFNITKEGRGLTDTFKTKLLNITPPKDLKQLQSILGLLNFARNFIPNFAELVQPLYNLIAPAKGKYIEWSEENTKQLNMVIEALNTASNLEERLPEQRLVIKVNTSPSAGYVRYYNETGKKPIMYLNYVFSKAELKFSMLEKLLTTMHKALIKAMDLAMGQEILVYSPIVSMTKIQKTPLPERKALPIRWITWMTYLEDPRIQFHYDKTLPELKHIPDVYTSSQSPVKHPSQYEGVFYTDGSAIKSPDPTKSNNAGMGIVHATYKPEYQVLNQWSIPLGNHTAQMAEIAAVEFACKKALKIPGPVLVITDSFYVAESANKELPYWKSNGFVNNKKKPLKHISKWKSIAECLSMKPDITIQHEKGISLQIPVFILKGNALADKLATQGSYVVNAGKRTADGSEFEKRTADGSEFESPKKKAKVE

SEQ ID NO: 7553 - protein, 2176 aa, synthetic construct
MPAAKRVKLDGGDKKYSIGLDIGTNSVGWAVITDEYKVPSKKFKVLGNTDRHSIKKNLIGALLFDSGETAEATRLKRTARRRYTRRKNRICYLQEIFSNEMAKVDDSFFHRLEESFLVEEDKKHERHPIFGNIVDEVAYHEKYPTIYHLRKKLVDSTDKADLRLIYLALAHMIKFRGHFLIEGDLNPDNSDVDKLFIQLVQTYNQLFEENPINASGVDAKAILSARLSKSRRLENLIAQLPGEKKNGLFGNLIALSLGLTPNFKSNFDLAEDAKLQLSKDTYDDDLDNLLAQIGDQYADLFLAAKNLSDAILLSDILRVNTEITKAPLSASMIKRYDEHHQDLTLLKALVRQQLPEKYKEIFFDQSKNGYAGYIDGGASQEEFYKFIKPILEKMDGTEELLVKLNREDLLRKQRTFDNGSIPHQIHLGELHAILRRQEDFYPFLKDNREKIEKILTFRIPYYVGPLARGNSRFAWMTRKSEETITPWNFEEVVDKGASAQSFIERMTNFDKNLPNEKVLPKHSLLYEYFTVYNELTKVKYVTEGMRKPAFLSGEQKKAIVDLLFKTNRKVTVKQLKEDYFKKIECFDSVEISGVEDRFNASLGTYHDLLKIIKDKDFLDNEENEDILEDIVLTLTLFEDREMIEERLKTYAHLFDDKVMKQLKRRRYTGWGRLSRKLINGIRDKQSGKTILDFLKSDGFANRNFMQLIHDDSLTFKEDIQKAQVSGQGDSLHEHIANLAGSPAIKKGILQTVKVVDELVKVMGRHKPENIVIEMARENQTTQKGQKNSRERMKRIEEGIKELGSQILKEHPVENTQLQNEKLYLYYLQNGRDMYVDQELDINRLSDYDVDHIVPQSFLKDDSIDNKVLTRSDKARGKSDNVPSEEVVKKMKNYWRQLLNAKLITQRKFDNLTKAERGGLSELDKAGFIKRQLVETRQITKHVAQILDSRMNTKYDENDKLIREVKVITLKSKLVSDFRKDFQFYKVREINNYHHAHDAYLNAVVGTALIKKYPKLESEFVYGDYKVYDVRKMIAKSEQEIGKATAKYFFYSNIMNFFKTEITLANGEIRKRPLIETNGETGEIVWDKGRDFATVRKVLSMPQVNIVKKTEVQTGGFSKESILPKRNSDKLIARKKDWDPKKYGGFDSPTVAYSVLVVAKVEKGKSKKLKSVKELLGITIMERSSFEKNPIDFLEAKGYKEVKKDLIIKLPKYSLFELENGRKRMLASAGELQKGNELALPSKYVNFLYLASHYEKLKGSPEDNEQKQLFVEQHKHYLDEIIEQISEFSKRVILADANLDKVLSAYNKHRDKPIREQAENIIHLFTLTNLGAPAAFKYFDTTIDRKRYTSTKEVLDATLIHQSITGLYETRIDLSQLGGDGGPAPEAAAKGGGGGMNPLQLLQPLPAEIKGTKLLAHWNSGATITCIPESFLEDEQPIKKTLIKTIHGEKQQNVYYVTFKVKGRKVEAEVIASPYEYILLSPTDVPWLTQQPLQLTILVPLQEYQEKILSKTALPEDQKQQLKTLFVKYDNLWQHWENQVGHRKIRPHNIATGDYPPRPQKQYPINPKAKPSIQIVIDDLLKQGVLTPQNSTMNTPVYPVPKPDGRWRMVLDYREVNKTIPLTAAQNQHSAGILATIVRQKYKTTLDLANGFWAHPITPESYWLTAFTWQGKQYCWTRLPQGFLNSPALFNADVVDLLKEIPNVQVYVDDIYLSHDDPKEHVQQLEKVFQILLQAGYVVSLKKSEIGQKTVEFLGFNITKEGRGLTDTFKTKLLNITPPKDLKQLQSILGKLNFARNFIPNFAELVQPLYNLIAPAKGKYIEWSEENTKQLNMVIEALNTASNLEERLPEQRLVIKVNTSPSAGYVRYYNETGKKPIMYLNYVFSKAELKFSMLEKLLTTMHKALIKAMDLAMGQEILVYSPIVSMTKIQKTPLPERKALPIRWITWMTYLEDPRIQFHYDKTLPELKHIPDVYTSSQSPVKHPSQYEGVFYTDGSAIKSPDPTKSNNAGMGIVHATYKPEYQVLNQWSIPLGNHTAQMAEIAAVEFACKKALKIPGPVLVITDSFYVAESANKELPYWKSNGFVNNKKKPLKHISKWKSIAECLSMKPDITIQHEKGISLQIPVFILKGNALADKLATQGSYVVNAGKRTADGSEFEKRTADGSEFESPKKKAKVE

SEQ ID NO: 7554 - protein, 2094 aa, synthetic construct
MPAAKRVKLDGGDKKYSIGLDIGTNSVGWAVITDEYKVPSKKFKVLGNTDRHSIKKNLIGALLFDSGETAEATRLKRTARRRYTRRKNRICYLQEIFSNEMAKVDDSFFHRLEESFLVEEDKKHERHPIFGNIVDEVAYHEKYPTIYHLRKKLVDSTDKADLRLIYLALAHMIKFRGHFLIEGDLNPDNSDVDKLFIQLVQTYNQLFEENPINASGVDAKAILSARLSKSRRLENLIAQLPGEKKNGLFGNLIALSLGLTPNFKSNFDLAEDAKLQLSKDTYDDDLDNLLAQIGDQYADLFLAAKNLSDAILLSDILRVNTEITKAPLSASMIKRYDEHHQDLTLLKALVRQQLPEKYKEIFFDQSKNGYAGYIDGGASQEEFYKFIKPILEKMDGTEELLVKLNREDLLRKQRTFDNGSIPHQIHLGELHAILRRQEDFYPFLKDNREKIEKILTFRIPYYVGPLARGNSRFAWMTRKSEETITPWNFEEVVDKGASAQSFIERMTNFDKNLPNEKVLPKHSLLYEYFTVYNELTKVKYVTEGMRKPAFLSGEQKKAIVDLLFKTNRKVTVKQLKEDYFKKIECFDSVEISGVEDRFNASLGTYHDLLKIIKDKDFLDNEENEDILEDIVLTLTLFEDREMIEERLKTYAHLFDDKVMKQLKRRRYTGWGRLSRKLINGIRDKQSGKTILDFLKSDGFANRNFMQLIHDDSLTFKEDIQKAQVSGQGDSLHEHIANLAGSPAIKKGILQTVKVVDELVKVMGRHKPENIVIEMARENQTTQKGQKNSRERMKRIEEGIKELGSQILKEHPVENTQLQNEKLYLYYLQNGRDMYVDQELDINRLSDYDVDHIVPQSFLKDDSIDNKVLTRSDKARGKSDNVPSEEVVKKMKNYWRQLLNAKLITQRKFDNLTKAERGGLSELDKAGFIKRQLVETRQITKHVAQILDSRMNTKYDENDKLIREVKVITLKSKLVSDFRKDFQFYKVREINNYHHAHDAYLNAVVGTALIKKYPKLESEFVYGDYKVYDVRKMIAKSEQEIGKATAKYFFYSNIMNFFKTEITLANGEIRKRPLIETNGETGEIVWDKGRDFATVRKVLSMPQVNIVKKTEVQTGGFSKESILPKRNSDKLIARKKDWDPKKYGGFDSPTVAYSVLVVAKVEKGKSKKLKSVKELLGITIMERSSFEKNPIDFLEAKGYKEVKKDLIIKLPKYSLFELENGRKRMLASAGELQKGNELALPSKYVNFLYLASHYEKLKGSPEDNEQKQLFVEQHKHYLDEIIEQISEFSKRVILADANLDKVLSAYNKHRDKPIREQAENIIHLFTLTNLGAPAAFKYFDTTIDRKRYTSTKEVLDATLIHQSITGLYETRIDLSQLGGDGGPAPEAAAKGGGGGVLNLEEEYRLHEKPVPSSIDPSWLQLFPTVWAERAGMGLANQVPPVVVELRSGASPVAVRQYPMSKEAREGIRPHIQKFLDLGVLVPCRSPWNTPLLPVKKPGTNDYRPVQDLREINKRVQDIHPTVPNPYNLLSSLPPSYTWYSVLDLKDAFFCLRLHPNSQPLFAFEWKDPEKGNTGQLTWTRLPQGFKNSPTLFNEALHRDLAPFRALNPQVVLLQYVDDLLVAAPTYEDCKKGTQKLLQELSKLGYRVSAKKAQLCQREVTYLGYLLKEGKRWLTPARKATVMKIPVPTTPRQVREFLGKAGFCRLFIPGFASLAAPLYPLTKPSIPFIWTEEHQQAFDHIKKALLSAPALALPDLTKPFTLYIDERAGVARGVLTQTLGPWRRPVAYLSKKLDPVASGWPTCLKAVAAVALLLKDADKLTLGQNVTVIASHSLESIVRQPPDRWMTNARMTHYQSLLLNERVSFAPPAVLNPATLLPVESEATPVHRCSEILAEETGTRRDLEDQPLPGVPTWYTDGSSFITEGKRRAGAPIVDGKRTVWASSLPEGTSAQKAELVALTQALRLAEGKNINIYTDSRYAFATAHIHGAIYKQRGWLTSAGKDIKNKEEILALLEAIHLPRRVAIIHCPGHQRGSNPVATGNRRADEAAKQAALSTRVLAGTTKPAGKRTADGSEFEKRTADGSEFESPKKKAKVE

SEQ ID NO: 7555 - protein, 2127 aa, synthetic construct; identical to SEQ ID NO: 4537

SEQ ID NO: 7556 - protein, 2218 aa, synthetic construct
MPAAKRVKLDGGDKKYSIGLDIGTNSVGWAVITDEYKVPSKKFKVLGNTDRHSIKKNLIGALLFDSGETAEATRLKRTARRRYTRRKNRICYLQEIFSNEMAKVDDSFFHRLEESFLVEEDKKHERHPIFGNIVDEVAYHEKYPTIYHLRKKLVDSTDKADLRLIYLALAHMIKFRGHFLIEGDLNPDNSDVDKLFIQLVQTYNQLFEENPINASGVDAKAILSARLSKSRRLENLIAQLPGEKKNGLFGNLIALSLGLTPNFKSNFDLAEDAKLQLSKDTYDDDLDNLLAQIGDQYADLFLAAKNLSDAILLSDILRVNTEITKAPLSASMIKRYDEHHQDLTLLKALVRQQLPEKYKEIFFDQSKNGYAGYIDGGASQEEFYKFIKPILEKMDGTEELLVKLNREDLLRKQRTFDNGSIPHQIHLGELHAILRRQEDFYPFLKDNREKIEKILTFRIPYYVGPLARGNSRFAWMTRKSEETITPWNFEEVVDKGASAQSFIERMTNFDKNLPNEKVLPKHSLLYEYFTVYNELTKVKYVTEGMRKPAFLSGEQKKAIVDLLFKTNRKVTVKQLKEDYFKKIECFDSVEISGVEDRFNASLGTYHDLLKIIKDKDFLDNEENEDILEDIVLTLTLFEDREMIEERLKTYAHLFDDKVMKQLKRRRYTGWGRLSRKLINGIRDKQSGKTILDFLKSDGFANRNFMQLIHDDSLTFKEDIQKAQVSGQGDSLHEHIANLAGSPAIKKGILQTVKVVDELVKVMGRHKPENIVIEMARENQTTQKGQKNSRERMKRIEEGIKELGSQILKEHPVENTQLQNEKLYLYYLQNGRDMYVDQELDINRLSDYDVDHIVPQSFLKDDSIDNKVLTRSDKARGKSDNVPSEEVVKKMKNYWRQLLNAKLITQRKFDNLTKAERGGLSELDKAGFIKRQLVETRQITKHVAQILDSRMNTKYDENDKLIREVKVITLKSKLVSDFRKDFQFYKVREINNYHHAHDAYLNAVVGTALIKKYPKLESEFVYGDYKVYDVRKMIAKSEQEIGKATAKYFFYSNIMNFFKTEITLANGEIRKRPLIETNGETGEIVWDKGRDFATVRKVLSMPQVNIVKKTEVQTGGFSKESILPKRNSDKLIARKKDWDPKKYGGFDSPTVAYSVLVVAKVEKGKSKKLKSVKELLGITIMERSSFEKNPIDFLEAKGYKEVKKDLIIKLPKYSLFELENGRKRMLASAGELQKGNELALPSKYVNFLYLASHYEKLKGSPEDNEQKQLFVEQHKHYLDEIIEQISEFSKRVILADANLDKVLSAYNKHRDKPIREQAENIIHLFTLTNLGAPAAFKYFDTTIDRKRYTSTKEVLDATLIHQSITGLYETRIDLSQLGGDGGPAPEAAAKGGGGGTLGDQGSRGSDPLPEPRVTLTVEGIPTEFLVNTGAEHSVLTKPMGKMGSKRTVVAGATGSKVYPWTTKRLLKIGQKQVTHSFLVIPECPAPLLGRDLLTKLKAQIQFSTEGPQVTWEDRPAMCLVLNLEEEYRLHEKPVPPSIDPSWLQLFPMVWAEKAGMGLANQVPPVVVELKSDASPVAVRQYPMSKEAREGIRPHIQRFLDLGILVPCQSPWNTPLLPVKKPGTNDYRPVQDLREVNKRVQDIHPTVPNPYNLLSSLPPSHTWYSVLDLKDAFFCLKLHPNSQPLFAFEWRDPEKGNTGQLTWTRLPQGFKNSPTLFNEALHRDLASFRALNPQVVMLQYVDDLLVAAPTYRDCKEGTRRLLQELSKLGYRVSAKKAQLCREEVTYLGYLLKGGKRWLTPARKATVMKIPTPTTPRQVREFLGTAGFCRLWIPGFASLAAPLYPLTRPKVPFTWTEAHQEAFGRIKEALLSAPALALPDLTKPFALYVDEKEGVARGVLTQTLGPWRRPVAYLSKKLDPVASGWPTCLKAIAAVALLLKDADKLTLGQNVLVIAPHNLESIVRQPPDRWMTNARMTHYQSLLLNERVSFAPPAILNPATLLPVESDDTPIHICSEILAEETGTRPDLRDQPLPGVPAWYTDGSSFIMDGRRQAGAAIVDNKRTVWASNLPEGTSAQKAELIALTQALRLAEGKSINIYTDSRYAFATAHVHGAIYKQRGWLTSAGKDIKNKEEILALLEAIHLPKRVAIIHCPGHQRGTDPVATGNRKADEAAKQAAQSTRILTETTKNAGKRTADGSEFEKRTADGSEFESPKKKAKVE

SEQ ID NO: 7557 - protein, 2218 aa, synthetic construct
MPAAKRVKLDGGDKKYSIGLDIGTNSVGWAVITDEYKVPSKKFKVLGNTDRHSIKKNLIGALLFDSGETAEATRLKRTARRRYTRRKNRICYLQEIFSNEMAKVDDSFFHRLEESFLVEEDKKHERHPIFGNIVDEVAYHEKYPTIYHLRKKLVDSTDKADLRLIYLALAHMIKFRGHFLIEGDLNPDNSDVDKLFIQLVQTYNQLFEENPINASGVDAKAILSARLSKSRRLENLIAQLPGEKKNGLFGNLIALSLGLTPNFKSNFDLAEDAKLQLSKDTYDDDLDNLLAQIGDQYADLFLAAKNLSDAILLSDILRVNTEITKAPLSASMIKRYDEHHQDLTLLKALVRQQLPEKYKEIFFDQSKNGYAGYIDGGASQEEFYKFIKPILEKMDGTEELLVKLNREDLLRKQRTFDNGSIPHQIHLGELHAILRRQEDFYPFLKDNREKIEKILTFRIPYYVGPLARGNSRFAWMTRKSEETITPWNFEEVVDKGASAQSFIERMTNFDKNLPNEKVLPKHSLLYEYFTVYNELTKVKYVTEGMRKPAFLSGEQKKAIVDLLFKTNRKVTVKQLKEDYFKKIECFDSVEISGVEDRFNASLGTYHDLLKIIKDKDFLDNEENEDILEDIVLTLTLFEDREMIEERLKTYAHLFDDKVMKQLKRRRYTGWGRLSRKLINGIRDKQSGKTILDFLKSDGFANRNFMQLIHDDSLTFKEDIQKAQVSGQGDSLHEHIANLAGSPAIKKGILQTVKVVDELVKVMGRHKPENIVIEMARENQTTQKGQKNSRERMKRIEEGIKELGSQILKEHPVENTQLQNEKLYLYYLQNGRDMYVDQELDINRLSDYDVDHIVPQSFLKDDSIDNKVLTRSDKARGKSDNVPSEEVVKKMKNYWRQLLNAKLITQRKFDNLTKAERGGLSELDKAGFIKRQLVETRQITKHVAQILDSRMNTKYDENDKLIREVKVITLKSKLVSDFRKDFQFYKVREINNYHHAHDAYLNAVVGTALIKKYPKLESEFVYGDYKVYDVRKMIAKSEQEIGKATAKYFFYSNIMNFFKTEITLANGEIRKRPLIETNGETGEIVWDKGRDFATVRKVLSMPQVNIVKKTEVQTGGFSKESILPKRNSDKLIARKKDWDPKKYGGFDSPTVAYSVLVVAKVEKGKSKKLKSVKELLGITIMERSSFEKNPIDFLEAKGYKEVKKDLIIKLPKYSLFELENGRKRMLASAGELQKGNELALPSKYVNFLYLASHYEKLKGSPEDNEQKQLFVEQHKHYLDEIIEQISEFSKRVILADANLDKVLSAYNKHRDKPIREQAENIIHLFTLTNLGAPAAFKYFDTTIDRKRYTSTKEVLDATLIHQSITGLYETRIDLSQLGGDGGPAPEAAAKGGGGGTLGDQGSRGSDPLPEPRVTLTVEGIPTEFLVNTGAEHSVLTKPMGKMGSKRTVVAGATGSKVYPWTTKRLLKIGQKQVTHSFLVIPECPAPLLGRDLLTKLKAQIQFSTEGPQVTWEDRPAMCLVLNLEEEYRLHEKPVPPSIDPSWLQLFPMVWAEKAGMGLANQVPPVVVELKSDASPVAVRQYPMSKEAREGIRPHIQRFLDLGILVPCQSPWNTPLLPVKKPGTNDYRPVQDLREVNKRVQDIHPTVPNPYNLLSSLPPSHTWYSVLDLKDAFFCLKLHPNSQPLFAFEWRDPEKGNTGQLTWTRLPQGFKNSPTLFNEALHRDLASFRALNPQVVMLQYVDDLLVAAPTYRDCKEGTRRLLQELSKLGYRVSAKKAQLCREEVTYLGYLLKGGKRWLTPARKATVMKIPTPTTPRQVREFLGKAGFCRLFIPGFASLAAPLYPLTRPKVPFTWTEAHQEAFGRIKEALLSAPALALPDLTKPFALYVDEKEGVARGVLTQTLGPWRRPVAYLSKKLDPVASGWPTCLKAIAAVALLLKDADKLTLGQNVLVIAPHNLESIVRQPPDRWMTNARMTHYQSLLLNERVSFAPPAILNPATLLPVESDDTPIHICSEILAEETGTRPDLRDQPLPGVPAWYTDGSSFIMDGRRQAGAAIVDNKRTVWASNLPEGTSAQKAELIALTQALRLAEGKSINIYTDSRYAFATAHVHGAIYKQRGWLTSAGKDIKNKEEILALLEAIHLPKRVAIIHCPGHQRGTDPVATGNRKADEAAKQAAQSTRILTETTKNAGKRTADGSEFEKRTADGSEFESPKKKAKVE

SEQ ID NO: 7558 - protein, 2096 aa, synthetic construct
MPAAKRVKLDGGDKKYSIGLDIGTNSVGWAVITDEYKVPSKKFKVLGNTDRHSIKKNLIGALLFDSGETAEATRLKRTARRRYTRRKNRICYLQEIFSNEMAKVDDSFFHRLEESFLVEEDKKHERHPIFGNIVDEVAYHEKYPTIYHLRKKLVDSTDKADLRLIYLALAHMIKFRGHFLIEGDLNPDNSDVDKLFIQLVQTYNQLFEENPINASGVDAKAILSARLSKSRRLENLIAQLPGEKKNGLFGNLIALSLGLTPNFKSNFDLAEDAKLQLSKDTYDDDLDNLLAQIGDQYADLFLAAKNLSDAILLSDILRVNTEITKAPLSASMIKRYDEHHQDLTLLKALVRQQLPEKYKEIFFDQSKNGYAGYIDGGASQEEFYKFIKPILEKMDGTEELLVKLNREDLLRKQRTFDNGSIPHQIHLGELHAILRRQEDFYPFLKDNREKIEKILTFRIPYYVGPLARGNSRFAWMTRKSEETITPWNFEEVVDKGASAQSFIERMTNFDKNLPNEKVLPKHSLLYEYFTVYNELTKVKYVTEGMRKPAFLSGEQKKAIVDLLFKTNRKVTVKQLKEDYFKKIECFDSVEISGVEDRFNASLGTYHDLLKIIKDKDFLDNEENEDILEDIVLTLTLFEDREMIEERLKTYAHLFDDKVMKQLKRRRYTGWGRLSRKLINGIRDKQSGKTILDFLKSDGFANRNFMQLIHDDSLTFKEDIQKAQVSGQGDSLHEHIANLAGSPAIKKGILQTVKVVDELVKVMGRHKPENIVIEMARENQTTQKGQKNSRERMKRIEEGIKELGSQILKEHPVENTQLQNEKLYLYYLQNGRDMYVDQELDINRLSDYDVDHIVPQSFLKDDSIDNKVLTRSDKARGKSDNVPSEEVVKKMKNYWRQLLNAKLITQRKFDNLTKAERGGLSELDKAGFIKRQLVETRQITKHVAQILDSRMNTKYDENDKLIREVKVITLKSKLVSDFRKDFQFYKVREINNYHHAHDAYLNAVVGTALIKKYPKLESEFVYGDYKVYDVRKMIAKSEQEIGKATAKYFFYSNIMNFFKTEITLANGEIRKRPLIETNGETGEIVWDKGRDFATVRKVLSMPQVNIVKKTEVQTGGFSKESILPKRNSDKLIARKKDWDPKKYGGFDSPTVAYSVLVVAKVEKGKSKKLKSVKELLGITIMERSSFEKNPIDFLEAKGYKEVKKDLIIKLPKYSLFELENGRKRMLASAGELQKGNELALPSKYVNFLYLASHYEKLKGSPEDNEQKQLFVEQHKHYLDEIIEQISEFSKRVILADANLDKVLSAYNKHRDKPIREQAENIIHLFTLTNLGAPAAFKYFDTTIDRKRYTSTKEVLDATLIHQSITGLYETRIDLSQLGGDGGPAPEAAAKGGGGGTLNIEDEYRLHETSKGPDVPLGSTWLSDFPQAWAETGGMGLAVRQAPLIIPLKATSTPVSIKQYPMSQEARLGIKPHIQRLLDQGILVPCQSPWNTPLLPVKKPGTNDYRPVQDLREVNKRVEDIHPTVPNPYNLLSGLPPSHQWYTVLDLKDAFFCLRLHPTSQSLFAFEWRDPEMGISGQLTWTRLPQGFKNSPTLFNEALHRDLADFRIQHPDLILLQYVDDLLLAATSELDCQQGTRALLQTLGDLGYRASAKKAQICQKQVKYLGYLLKEGQRWLTEARKETVMGQPTPKTPRQLREFLGKAGFCRLFIPGFAEMAAPLYPLTKPGTLFEWGPDQQKAYQEIKQALLTAPALGLPDLTKPFELFVDEKQGYAKGVLTQKLGPWRRPVAYLSKKLDPVAAGWPPCLRMVAAIAVLTKDAGKLTMGQPLVILAPHAVEALVKQPPDRWLSNARMTHYQALLLDTDRVQFGPIVALNPATLLPLPEEGLQHDCLDILAEAHGTRPDLTDQPLPDADHTWYTDGSSFLQEGQRKAGAAVTTETEVVWAKALPAGTSAQRAELIALTQALKMAEGKKLNVYTDSRYAFATAHIHGEIYRRRGWLTSEGKEIKNKDEILALLKALFLPKRLSIIHCPGHQKGNRAEARGNRMADQAAREVATRETPETSTLLAGKRTADGSEFEKRTADGSEFESPKKKAKVE

SEQ ID NO: 7559 - protein, 2096 aa, synthetic construct
MPAAKRVKLDGGDKKYSIGLDIGTNSVGWAVITDEYKVPSKKFKVLGNTDRHSIKKNLIGALLFDSGETAEATRLKRTARRRYTRRKNRICYLQEIFSNEMAKVDDSFFHRLEESFLVEEDKKHERHPIFGNIVDEVAYHEKYPTIYHLRKKLVDSTDKADLRLIYLALAHMIKFRGHFLIEGDLNPDNSDVDKLFIQLVQTYNQLFEENPINASGVDAKAILSARLSKSRRLENLIAQLPGEKKNGLFGNLIALSLGLTPNFKSNFDLAEDAKLQLSKDTYDDDLDNLLAQIGDQYADLFLAAKNLSDAILLSDILRVNTEITKAPLSASMIKRYDEHHQDLTLLKALVRQQLPEKYKEIFFDQSKNGYAGYIDGGASQEEFYKFIKPILEKMDGTEELLVKLNREDLLRKQRTFDNGSIPHQIHLGELHAILRRQEDFYPFLKDNREKIEKILTFRIPYYVGPLARGNSRFAWMTRKSEETITPWNFEEVVDKGASAQSFIERMTNFDKNLPNEKVLPKHSLLYEYFTVYNELTKVKYVTEGMRKPAFLSGEQKKAIVDLLFKTNRKVTVKQLKEDYFKKIECFDSVEISGVEDRFNASLGTYHDLLKIIKDKDFLDNEENEDILEDIVLTLTLFEDREMIEERLKTYAHLFDDKVMKQLKRRRYTGWGRLSRKLINGIRDKQSGKTILDFLKSDGFANRNFMQLIHDDSLTFKEDIQKAQVSGQGDSLHEHIANLAGSPAIKKGILQTVKVVDELVKVMGRHKPENIVIEMARENQTTQKGQKNSRERMKRIEEGIKELGSQILKEHPVENTQLQNEKLYLYYLQNGRDMYVDQELDINRLSDYDVDHIVPQSFLKDDSIDNKVLTRSDKARGKSDNVPSEEVVKKMKNYWRQLLNAKLITQRKFDNLTKAERGGLSELDKAGFIKRQLVETRQITKHVAQILDSRMNTKYDENDKLIREVKVITLKSKLVSDFRKDFQFYKVREINNYHHAHDAYLNAVVGTALIKKYPKLESEFVYGDYKVYDVRKMIAKSEQEIGKATAKYFFYSNIMNFFKTEITLANGEIRKRPLIETNGETGEIVWDKGRDFATVRKVLSMPQVNIVKKTEVQTGGFSKESILPKRNSDKLIARKKDWDPKKYGGFDSPTVAYSVLVVAKVEKGKSKKLKSVKELLGITIMERSSFEKNPIDFLEAKGYKEVKKDLIIKLPKYSLFELENGRKRMLASAGELQKGNELALPSKYVNFLYLASHYEKLKGSPEDNEQKQLFVEQHKHYLDEIIEQISEFSKRVILADANLDKVLSAYNKHRDKPIREQAENIIHLFTLTNLGAPAAFKYFDTTIDRKRYTSTKEVLDATLIHQSITGLYETRIDLSQLGGDGGPAPEAAAKGGGGGTLNIEDEHRLHETSKEPDVSLGSTWLSDFPQAWAETGGMGLAVRQAPLIIPLKATSTPVSIKQYPMSQEARLGIKPHIQRLLDQGILVPCQSPWNTPLLPVKKPGTNDYRPVQDLREVNKRVEDIHPTVPNPYNLLSGLPPSHQWYTVLDLKDAFFCLRLHPTSQPLFAFEWRDPEMGISGQLTWTRLPQGFKNSPTLFDEALHRDLADFRIQHPDLILLQYVDDLLLAATSELDCQQGTRALLQTLGNLGYRASAKKAQICQKQVKYLGYLLKEGQRWLTEARKETVMGQPTPKTPRQLREFLGTAGFCRLWIPGFAEMAAPLYPLTKTGTLFNWGPDQQKAYQEIKQALLTAPALGLPDLTKPFELFVDEKQGYAKGVLTQKLGPWRRPVAYLSKKLDPVAAGWPPCLRMVAAIAVLTKDAGKLTMGQPLVILAPHAVEALVKQPPDRWLSNARMTHYQALLLDTDRVQFGPVVALNPATLLPLPEEGLQHNCLDILAEAHGTRPDLTDQPLPDADHTWYTDGSSLLQEGQRKAGAAVTTETEVIWAKALPAGTSAQRAELIALTQALKMAEGKKLNVYTDSRYAFATAHIHGEIYRRRGLLTSEGKEIKNKDEILALLKALFLPKRLSIIHCPGHQKGHSAEARGNRMADQAARKAAITETPDTSTLLAGKRTADGSEFEKRTADGSEFESPKKKAKVE

SEQ ID NO: 7560 - protein, 2096 aa, synthetic construct; identical to SEQ ID NO: 7559

SEQ ID NO: 7561 - protein, 2116 aa, synthetic construct
MPAAKRVKLDGGDKKYSIGLDIGTNSVGWAVITDEYKVPSKKFKVLGNTDRHSIKKNLIGALLFDSGETAEATRLKRTARRRYTRRKNRICYLQEIFSNEMAKVDDSFFHRLEESFLVEEDKKHERHPIFGNIVDEVAYHEKYPTIYHLRKKLVDSTDKADLRLIYLALAHMIKFRGHFLIEGDLNPDNSDVDKLFIQLVQTYNQLFEENPINASGVDAKAILSARLSKSRRLENLIAQLPGEKKNGLFGNLIALSLGLTPNFKSNFDLAEDAKLQLSKDTYDDDLDNLLAQIGDQYADLFLAAKNLSDAILLSDILRVNTEITKAPLSASMIKRYDEHHQDLTLLKALVRQQLPEKYKEIFFDQSKNGYAGYIDGGASQEEFYKFIKPILEKMDGTEELLVKLNREDLLRKQRTFDNGSIPHQIHLGELHAILRRQEDFYPFLKDNREKIEKILTFRIPYYVGPLARGNSRFAWMTRKSEETITPWNFEEVVDKGASAQSFIERMTNFDKNLPNEKVLPKHSLLYEYFTVYNELTKVKYVTEGMRKPAFLSGEQKKAIVDLLFKTNRKVTVKQLKEDYFKKIECFDSVEISGVEDRFNASLGTYHDLLKIIKDKDFLDNEENEDILEDIVLTLTLFEDREMIEERLKTYAHLFDDKVMKQLKRRRYTGWGRLSRKLINGIRDKQSGKTILDFLKSDGFANRNFMQLIHDDSLTFKEDIQKAQVSGQGDSLHEHIANLAGSPAIKKGILQTVKVVDELVKVMGRHKPENIVIEMARENQTTQKGQKNSRERMKRIEEGIKELGSQILKEHPVENTQLQNEKLYLYYLQNGRDMYVDQELDINRLSDYDVDHIVPQSFLKDDSIDNKVLTRSDKARGKSDNVPSEEVVKKMKNYWRQLLNAKLITQRKFDNLTKAERGGLSELDKAGFIKRQLVETRQITKHVAQILDSRMNTKYDENDKLIREVKVITLKSKLVSDFRKDFQFYKVREINNYHHAHDAYLNAVVGTALIKKYPKLESEFVYGDYKVYDVRKMIAKSEQEIGKATAKYFFYSNIMNFFKTEITLANGEIRKRPLIETNGETGEIVWDKGRDFATVRKVLSMPQVNIVKKTEVQTGGFSKESILPKRNSDKLIARKKDWDPKKYGGFDSPTVAYSVLVVAKVEKGKSKKLKSVKELLGITIMERSSFEKNPIDFLEAKGYKEVKKDLIIKLPKYSLFELENGRKRMLASAGELQKGNELALPSKYVNFLYLASHYEKLKGSPEDNEQKQLFVEQHKHYLDEIIEQISEFSKRVILADANLDKVLSAYNKHRDKPIREQAENIIHLFTLTNLGAPAAFKYFDTTIDRKRYTSTKEVLDATLIHQSITGLYETRIDLSQLGGDGGPAPEAAAKGGGGGVQEISDSRPMLHIYLNGRRFLGLLDTGADKTCIAGRDWPANWPIHQTESSLQGLGMACGVARSSQPLRWQHEDKSGIIHPFVIPTLPFTLWGRDIMKDIKVRLMTDSPDDSQDLMIGAIESNLFADQISWKSDQPVWLNQWPLKQEKLQALQQLVTEQLQLGHLEESNSPWNTPVFVIKKKSGKWRLLQDLRAVNATMHDMGALQPGLPSPVAVPKGWEIIIIDLQDCFFNIKLHPEDCKRFAFSVPSPNFKRPYQRFQWKVLPQGMKNSPTLCQKFVDKAILTVRDKYQDSYIVHYMDDILLAHPSRSIVDEILTSMIQALNKHGLVVSTEKIQKYDNLKYLGTHIQGDSVSYQKLQIRTDKLRTLNDFQKLLGNINWIRPFLKLTTGELKPLFEILNGDSNPISTRKLTPEACKALQLMNERLSTARVKRLDLSQPWSLCILKTEYTPTACLWQDGVVEWIHLPHISPKVITPYDIFCTQLIIKGRHRSKELFSKDPDYIVVPYTKVQFDLLLQEKEDWPISLLGFLGEVHFHLPKDPLLTFTLQTAIIFPHMTSTTPLEKGIVIFTDGSANGRSVTYIQGREPIIKENTQNTAQQAEIVAVITAFEEVSQPFNLYTDSKYVTGLFPEIETATLSPRTKIYTELKHLQRLIHKRQEKFYIGHIRGHTGLPGPLAQGNAYADSLTRILTAAGKRTADGSEFEKRTADGSEFESPKKKAKVE

SEQ ID NO: 7562 - protein, 2090 aa, synthetic construct
MPAAKRVKLDGGDKKYSIGLDIGTNSVGWAVITDEYKVPSKKFKVLGNTDRHSIKKNLIGALLFDSGETAEATRLKRTARRRYTRRKNRICYLQEIFSNEMAKVDDSFFHRLEESFLVEEDKKHERHPIFGNIVDEVAYHEKYPTIYHLRKKLVDSTDKADLRLIYLALAHMIKFRGHFLIEGDLNPDNSDVDKLFIQLVQTYNQLFEENPINASGVDAKAILSARLSKSRRLENLIAQLPGEKKNGLFGNLIALSLGLTPNFKSNFDLAEDAKLQLSKDTYDDDLDNLLAQIGDQYADLFLAAKNLSDAILLSDILRVNTEITKAPLSASMIKRYDEHHQDLTLLKALVRQQLPEKYKEIFFDQSKNGYAGYIDGGASQEEFYKFIKPILEKMDGTEELLVKLNREDLLRKQRTFDNGSIPHQIHLGELHAILRRQEDFYPFLKDNREKIEKILTFRIPYYVGPLARGNSRFAWMTRKSEETITPWNFEEVVDKGASAQSFIERMTNFDKNLPNEKVLPKHSLLYEYFTVYNELTKVKYVTEGMRKPAFLSGEQKKAIVDLLFKTNRKVTVKQLKEDYFKKIECFDSVEISGVEDRFNASLGTYHDLLKIIKDKDFLDNEENEDILEDIVLTLTLFEDREMIEERLKTYAHLFDDKVMKQLKRRRYTGWGRLSRKLINGIRDKQSGKTILDFLKSDGFANRNFMQLIHDDSLTFKEDIQKAQVSGQGDSLHEHIANLAGSPAIKKGILQTVKVVDELVKVMGRHKPENIVIEMARENQTTQKGQKNSRERMKRIEEGIKELGSQILKEHPVENTQLQNEKLYLYYLQNGRDMYVDQELDINRLSDYDVDHIVPQSFLKDDSIDNKVLTRSDKARGKSDNVPSEEVVKKMKNYWRQLLNAKLITQRKFDNLTKAERGGLSELDKAGFIKRQLVETRQITKHVAQILDSRMNTKYDENDKLIREVKVITLKSKLVSDFRKDFQFYKVREINNYHHAHDAYLNAVVGTALIKKYPKLESEFVYGDYKVYDVRKMIAKSEQEIGKATAKYFFYSNIMNFFKTEITLANGEIRKRPLIETNGETGEIVWDKGRDFATVRKVLSMPQVNIVKKTEVQTGGFSKESILPKRNSDKLIARKKDWDPKKYGGFDSPTVAYSVLVVAKVEKGKSKKLKSVKELLGITIMERSSFEKNPIDFLEAKGYKEVKKDLIIKLPKYSLFELENGRKRMLASAGELQKGNELALPSKYVNFLYLASHYEKLKGSPEDNEQKQLFVEQHKHYLDEIIEQISEFSKRVILADANLDKVLSAYNKHRDKPIREQAENIIHLFTLTNLGAPAAFKYFDTTIDRKRYTSTKEVLDATLIHQSITGLYETRIDLSQLGGDGGPAPEAAAKGGGGGTLQLDDEYRLYSPLVKPDQNIQFWLEQFPQAWAETAGMGLAKQVPPQVIQLKASATPVSVRQYPLSKEAQEGIRPHVQRLIQQGILVPVQSPWNTPLLPVRKPGTNDYRPVQDLREVNKRVQDIHPTVPNPYNLLCALPPQRSWYTVLDLKDAFFCLRLHPTSQPLFAFEWRDPGTGRTGQLTWTRLPQGFKNSPTIFDEALHRDLANFRIQHPQVTLLQYVDDLLLAGATKQDCLEGTKALLLELSDLGYRASAKKAQICRREVTYLGYSLRDGQRWLTEARKKTVVQIPAPTTAKQVREFLGTAGFCRLWIPGFATLAAPLYPLTKEKGEFSWAPEHQKAFDAIKKALLSAPALALPDVTKPFTLYVDERKGVARGVLTQTLGPWRRPVAYLSKKLDPVASGWPVCLKAIAAVAILVKDADKLTLGQNITVIAPHALENIVRQPPDRWMTNARMTHYQSLLLTERVTFAPPAALNPATLLPEETDEPVTHDCHQLLIEETGVRKDLTDIPLTGEVLTWFTDGSSYVVEGKRMAGAAVVDGTRTIWASSLPEGTSAQKAELMALTQALRLAEGKSINIYTDSRYAFATAHVHGAIYKQRGLLTSAGREIKNKEEILSLLEALHLPKRLAIIHCPGHQKAKDPISRGNQMADRVAKQAAQGVNLLAGKRTADGSEFEKRTADGSEFESPKKKAKVE

SEQ ID NO: 7563 - protein, 2176 aa, synthetic construct
MPAAKRVKLDGGDKKYSIGLDIGTNSVGWAVITDEYKVPSKKFKVLGNTDRHSIKKNLIGALLFDSGETAEATRLKRTARRRYTRRKNRICYLQEIFSNEMAKVDDSFFHRLEESFLVEEDKKHERHPIFGNIVDEVAYHEKYPTIYHLRKKLVDSTDKADLRLIYLALAHMIKFRGHFLIEGDLNPDNSDVDKLFIQLVQTYNQLFEENPINASGVDAKAILSARLSKSRRLENLIAQLPGEKKNGLFGNLIALSLGLTPNFKSNFDLAEDAKLQLSKDTYDDDLDNLLAQIGDQYADLFLAAKNLSDAILLSDILRVNTEITKAPLSASMIKRYDEHHQDLTLLKALVRQQLPEKYKEIFFDQSKNGYAGYIDGGASQEEFYKFIKPILEKMDGTEELLVKLNREDLLRKQRTFDNGSIPHQIHLGELHAILRRQEDFYPFLKDNREKIEKILTFRIPYYVGPLARGNSRFAWMTRKSEETITPWNFEEVVDKGASAQSFIERMTNFDKNLPNEKVLPKHSLLYEYFTVYNELTKVKYVTEGMRKPAFLSGEQKKAIVDLLFKTNRKVTVKQLKEDYFKKIECFDSVEISGVEDRFNASLGTYHDLLKIIKDKDFLDNEENEDILEDIVLTLTLFEDREMIEERLKTYAHLFDDKVMKQLKRRRYTGWGRLSRKLINGIRDKQSGKTILDFLKSDGFANRNFMQLIHDDSLTFKEDIQKAQVSGQGDSLHEHIANLAGSPAIKKGILQTVKVVDELVKVMGRHKPENIVIEMARENQTTQKGQKNSRERMKRIEEGIKELGSQILKEHPVENTQLQNEKLYLYYLQNGRDMYVDQELDINRLSDYDVDHIVPQSFLKDDSIDNKVLTRSDKARGKSDNVPSEEVVKKMKNYWRQLLNAKLITQRKFDNLTKAERGGLSELDKAGFIKRQLVETRQITKHVAQILDSRMNTKYDENDKLIREVKVITLKSKLVSDFRKDFQFYKVREINNYHHAHDAYLNAVVGTALIKKYPKLESEFVYGDYKVYDVRKMIAKSEQEIGKATAKYFFYSNIMNFFKTEITLANGEIRKRPLIETNGETGEIVWDKGRDFATVRKVLSMPQVNIVKKTEVQTGGFSKESILPKRNSDKLIARKKDWDPKKYGGFDSPTVAYSVLVVAKVEKGKSKKLKSVKELLGITIMERSSFEKNPIDFLEAKGYKEVKKDLIIKLPKYSLFELENGRKRMLASAGELQKGNELALPSKYVNFLYLASHYEKLKGSPEDNEQKQLFVEQHKHYLDEIIEQISEFSKRVILADANLDKVLSAYNKHRDKPIREQAENIIHLFTLTNLGAPAAFKYFDTTIDRKRYTSTKEVLDATLIHQSITGLYETRIDLSQLGGDGGPAPEAAAKGGGGGMDPLQLLQPLEAEIKGTKLKAHWNSGATITCVPEAFLEDERPIQTMLIKTIHGEKQQDVYYLTFKVQGRKVEAEVLASPYDYILLNPSDVPWLMKKPLQLTVLVPLHEYQERLLQQTALPKEQKELLQKLFLKYDALWQHWENQVGHRRIKPHNIATGTLAPRPQKQYPINPKAKPSIQIVIDDLLKQGVLIQQNSTMNTPVYPVPKPDGKWRMVLDYREVNKTIPLIAAQNQHSAGILSSIYRGKYKTTLDLTNGFWAHPITPESYWLTAFTWQGKQYCWTRLPQGFLNSPALFTADVVDLLKEIPNVQAYVDDIYISHDDPQEHLEQLEKIFSILLNAGYVVSLKKSEIAQREVEFLGFNITKEGRGLTDTFKQKLLNITPPKDLKQLQSILGLLNFARNFIPNYSELVKPLYTIVANANGKFISWTEDNSNQLQHIISVLNQADNLEERNPETRLIIKVNSSPSAGYIRYYNEGSKRPIMYVNYIFSKAEAKFTQTEKLLTTMHKGLIKAMDLAMGQEILVYSPIVSMTKIQRTPLPERKALPVRWITWMTYLEDPRIQFHYDKSLPELQQIPNVTEDVIAKTKHPSEFAMVFYTDGSAIKHPDVNKSHSAGMGIAQVQFIPEYKIVHQWSIPLGDHTAQLAEIAAVEFACKKALKISGPVLIVTDSFYVAESANKELPYWKSNGFLNNKKKPLRHVSKWKSIAECLQLKPDIIIMHEKGHQQPMTTLHTEGNNLADKLATQGSYVVHAGKRTADGSEFEKRTADGSEFESPKKKAKVE

SEQ ID NO: 7564 - protein, 2176 aa, synthetic construct
MPAAKRVKLDGGDKKYSIGLDIGTNSVGWAVITDEYKVPSKKFKVLGNTDRHSIKKNLIGALLFDSGETAEATRLKRTARRRYTRRKNRICYLQEIFSNEMAKVDDSFFHRLEESFLVEEDKKHERHPIFGNIVDEVAYHEKYPTIYHLRKKLVDSTDKADLRLIYLALAHMIKFRGHFLIEGDLNPDNSDVDKLFIQLVQTYNQLFEENPINASGVDAKAILSARLSKSRRLENLIAQLPGEKKNGLFGNLIALSLGLTPNFKSNFDLAEDAKLQLSKDTYDDDLDNLLAQIGDQYADLFLAAKNLSDAILLSDILRVNTEITKAPLSASMIKRYDEHHQDLTLLKALVRQQLPEKYKEIFFDQSKNGYAGYIDGGASQEEFYKFIKPILEKMDGTEELLVKLNREDLLRKQRTFDNGSIPHQIHLGELHAILRRQEDFYPFLKDNREKIEKILTFRIPYYVGPLARGNSRFAWMTRKSEETITPWNFEEVVDKGASAQSFIERMTNFDKNLPNEKVLPKHSLLYEYFTVYNELTKVKYVTEGMRKPAFLSGEQKKAIVDLLFKTNRKVTVKQLKEDYFKKIECFDSVEISGVEDRFNASLGTYHDLLKIIKDKDFLDNEENEDILEDIVLTLTLFEDREMIEERLKTYAHLFDDKVMKQLKRRRYTGWGRLSRKLINGIRDKQSGKTILDFLKSDGFANRNFMQLIHDDSLTFKEDIQKAQVSGQGDSLHEHIANLAGSPAIKKGILQTVKVVDELVKVMGRHKPENIVIEMARENQTTQKGQKNSRERMKRIEEGIKELGSQILKEHPVENTQLQNEKLYLYYLQNGRDMYVDQELDINRLSDYDVDHIVPQSFLKDDSIDNKVLTRSDKARGKSDNVPSEEVVKKMKNYWRQLLNAKLITQRKFDNLTKAERGGLSELDKAGFIKRQLVETRQITKHVAQILDSRMNTKYDENDKLIREVKVITLKSKLVSDFRKDFQFYKVREINNYHHAHDAYLNAVVGTALIKKYPKLESEFVYGDYKVYDVRKMIAKSEQEIGKATAKYFFYSNIMNFFKTEITLANGEIRKRPLIETNGETGEIVWDKGRDFATVRKVLSMPQVNIVKKTEVQTGGFSKESILPKRNSDKLIARKKDWDPKKYGGFDSPTVAYSVLVVAKVEKGKSKKLKSVKELLGITIMERSSFEKNPIDFLEAKGYKEVKKDLIIKLPKYSLFELENGRKRMLASAGELQKGNELALPSKYVNFLYLASHYEKLKGSPEDNEQKQLFVEQHKHYLDEIIEQISEFSKRVILADANLDKVLSAYNKHRDKPIREQAENIIHLFTLTNLGAPAAFKYFDTTIDRKRYTSTKEVLDATLIHQSITGLYETRIDLSQLGGDGGPAPEAAAKGGGGGMDPLQLLQPLEAEIKGTKLKAHWNSGATITCVPEAFLEDERPIQTMLIKTIHGEKQQDVYYLTFKVQGRKVEAEVLASPYDYILLNPSDVPWLMKKPLQLTVLVPLHEYQERLLQQTALPKEQKELLQKLFLKYDALWQHWENQVGHRRIKPHNIATGTLAPRPQKQYPINPKAKPSIQIVIDDLLKQGVLIQQNSTMNTPVYPVPKPDGKWRMVLDYREVNKTIPLIAAQNQHSAGILSSIYRGKYKTTLDLTNGFWAHPITPESYWLTAFTWQGKQYCWTRLPQGFLNSPALFNADVVDLLKEIPNVQAYVDDIYISHDDPQEHLEQLEKIFSILLNAGYVVSLKKSEIAQREVEFLGFNITKEGRGLTDTFKQKLLNITPPKDLKQLQSILGLLNFARNFIPNYSELVKPLYTIVAPANGKFISWTEDNSNQLQHIISVLNQADNLEERNPETRLIIKVNSSPSAGYIRYYNEGSKRPIMYVNYIFSKAEAKFTQTEKLLTTMHKGLIKAMDLAMGQEILVYSPIVSMTKIQRTPLPERKALPVRWITWMTYLEDPRIQFHYDKSLPELQQIPNVTEDVIAKTKHPSEFAMVFYTDGSAIKHPDVNKSHSAGMGIAQVQFIPEYKIVHQWSIPLGDHTAQLAEIAAVEFACKKALKISGPVLIVTDSFYVAESANKELPYWKSNGFLNNKKKPLRHVSKWKSIAECLQLKPDIIIMHEKGHQQPMTTLHTEGNNLADKLATQGSYVVHAGKRTADGSEFEKRTADGSEFESPKKKAKVE

SEQ ID NO: 7565 - protein, 2087 aa, synthetic construct
MPAAKRVKLDGGDKKYSIGLDIGTNSVGWAVITDEYKVPSKKFKVLGNTDRHSIKKNLIGALLFDSGETAEATRLKRTARRRYTRRKNRICYLQEIFSNEMAKVDDSFFHRLEESFLVEEDKKHERHPIFGNIVDEVAYHEKYPTIYHLRKKLVDSTDKADLRLIYLALAHMIKFRGHFLIEGDLNPDNSDVDKLFIQLVQTYNQLFEENPINASGVDAKAILSARLSKSRRLENLIAQLPGEKKNGLFGNLIALSLGLTPNFKSNFDLAEDAKLQLSKDTYDDDLDNLLAQIGDQYADLFLAAKNLSDAILLSDILRVNTEITKAPLSASMIKRYDEHHQDLTLLKALVRQQLPEKYKEIFFDQSKNGYAGYIDGGASQEEFYKFIKPILEKMDGTEELLVKLNREDLLRKQRTFDNGSIPHQIHLGELHAILRRQEDFYPFLKDNREKIEKILTFRIPYYVGPLARGNSRFAWMTRKSEETITPWNFEEVVDKGASAQSFIERMTNFDKNLPNEKVLPKHSLLYEYFTVYNELTKVKYVTEGMRKPAFLSGEQKKAIVDLLFKTNRKVTVKQLKEDYFKKIECFDSVEISGVEDRFNASLGTYHDLLKIIKDKDFLDNEENEDILEDIVLTLTLFEDREMIEERLKTYAHLFDDKVMKQLKRRRYTGWGRLSRKLINGIRDKQSGKTILDFLKSDGFANRNFMQLIHDDSLTFKEDIQKAQVSGQGDSLHEHIANLAGSPAIKKGILQTVKVVDELVKVMGRHKPENIVIEMARENQTTQKGQKNSRERMKRIEEGIKELGSQILKEHPVENTQLQNEKLYLYYLQNGRDMYVDQELDINRLSDYDVDHIVPQSFLKDDSIDNKVLTRSDKARGKSDNVPSEEVVKKMKNYWRQLLNAKLITQRKFDNLTKAERGGLSELDKAGFIKRQLVETRQITKHVAQILDSRMNTKYDENDKLIREVKVITLKSKLVSDFRKDFQFYKVREINNYHHAHDAYLNAVVGTALIKKYPKLESEFVYGDYKVYDVRKMIAKSEQEIGKATAKYFFYSNIMNFFKTEITLANGEIRKRPLIETNGETGEIVWDKGRDFATVRKVLSMPQVNIVKKTEVQTGGFSKESILPKRNSDKLIARKKDWDPKKYGGFDSPTVAYSVLVVAKVEKGKSKKLKSVKELLGITIMERSSFEKNPIDFLEAKGYKEVKKDLIIKLPKYSLFELENGRKRMLASAGELQKGNELALPSKYVNFLYLASHYEKLKGSPEDNEQKQLFVEQHKHYLDEIIEQISEFSKRVILADANLDKVLSAYNKHRDKPIREQAENIIHLFTLTNLGAPAAFKYFDTTIDRKRYTSTKEVLDATLIHQSITGLYETRIDLSQLGGDGGPAPEAAAKGGGGGIPWLMKKPLQLTTLVPLQEYEERLLKQTMLTGSYKEKLQSLFLKYDALWQHWENQVGHRRIKPHHIATGTVNPRPQKQYPINPKAKASIQTVINDLLKQGVLIQQNSIMNTPVYPVPKPDGKWRMVLDYREVNKTIPLIAAQNQHSAGILSSIFRGKYKTTLDLSNGFWAHSITPESYWLTAFTWLGQQYCWTRLPQGFLNSPALFTADVVDLLKEVPNVQVYVDDIYISHDDPREHLEQLEKVFSLLLNAGYVVSLKKSEIAQHEVEFLGFNITKEGRGLTETFKQKLLNITPPRDLKQLQSILGLLNFARNFIPNFSELVKPLYNIIATANGKYITWTTDNSQQLQNIISMLNSAENLEERNPEVRLIMKVNTSPSAGYIRFYNEFAKRPIMYLNYVYTKAEVKFTNTEKLLTTIHKGLIKALDLGMGQEILVYSPIVSMTKIQKTPLPERKALPIRWITWMSYLEDPRIQFHYDKTLPELQQVPTVTDDIIAKIKHPSEFSMVFYTDGSAIKHPNVNKSHNAGMGIAQVQFKPEFTVINTWSIPLGDHTAQLAEVAAVEFACKKALKIDGPVLIVTDSFYVAESVNKELPYWQSNGFFNNKKKPLKHVSKWKSIADCIQLKPDIIIIHEKGHQPTASTFHTEGNNLADKLATQGSYVVNAGKRTADGSEFEKRTADGSEFESPKKKAKVE

SEQ ID NO: 7566 - protein, 2096 aa, synthetic construct
MPAAKRVKLDGGDKKYSIGLDIGTNSVGWAVITDEYKVPSKKFKVLGNTDRHSIKKNLIGALLFDSGETAEATRLKRTARRRYTRRKNRICYLQEIFSNEMAKVDDSFFHRLEESFLVEEDKKHERHPIFGNIVDEVAYHEKYPTIYHLRKKLVDSTDKADLRLIYLALAHMIKFRGHFLIEGDLNPDNSDVDKLFIQLVQTYNQLFEENPINASGVDAKAILSARLSKSRRLENLIAQLPGEKKNGLFGNLIALSLGLTPNFKSNFDLAEDAKLQLSKDTYDDDLDNLLAQIGDQYADLFLAAKNLSDAILLSDILRVNTEITKAPLSASMIKRYDEHHQDLTLLKALVRQQLPEKYKEIFFDQSKNGYAGYIDGGASQEEFYKFIKPILEKMDGTEELLVKLNREDLLRKQRTFDNGSIPHQIHLGELHAILRRQEDFYPFLKDNREKIEKILTFRIPYYVGPLARGNSRFAWMTRKSEETITPWNFEEVVDKGASAQSFIERMTNFDKNLPNEKVLPKHSLLYEYFTVYNELTKVKYVTEGMRKPAFLSGEQKKAIVDLLFKTNRKVTVKQLKEDYFKKIECFDSVEISGVEDRFNASLGTYHDLLKIIKDKDFLDNEENEDILEDIVLTLTLFEDREMIEERLKTYAHLFDDKVMKQLKRRRYTGWGRLSRKLINGIRDKQSGKTILDFLKSDGFANRNFMQLIHDDSLTFKEDIQKAQVSGQGDSLHEHIANLAGSPAIKKGILQTVKVVDELVKVMGRHKPENIVIEMARENQTTQKGQKNSRERMKRIEEGIKELGSQILKEHPVENTQLQNEKLYLYYLQNGRDMYVDQELDINRLSDYDVDHIVPQSFLKDDSIDNKVLTRSDKARGKSDNVPSEEVVKKMKNYWRQLLNAKLITQRKFDNLTKAERGGLSELDKAGFIKRQLVETRQITKHVAQILDSRMNTKYDENDKLIREVKVITLKSKLVSDFRKDFQFYKVREINNYHHAHDAYLNAVVGTALIKKYPKLESEFVYGDYKVYDVRKMIAKSEQEIGKATAKYFFYSNIMNFFKTEITLANGEIRKRPLIETNGETGEIVWDKGRDFATVRKVLSMPQVNIVKKTEVQTGGFSKESILPKRNSDKLIARKKDWDPKKYGGFDSPTVAYSVLVVAKVEKGKSKKLKSVKELLGITIMERSSFEKNPIDFLEAKGYKEVKKDLIIKLPKYSLFELENGRKRMLASAGELQKGNELALPSKYVNFLYLASHYEKLKGSPEDNEQKQLFVEQHKHYLDEIIEQISEFSKRVILADANLDKVLSAYNKHRDKPIREQAENIIHLFTLTNLGAPAAFKYFDTTIDRKRYTSTKEVLDATLIHQSITGLYETRIDLSQLGGDGGPAPEAAAKGGGGGTLNIEDEYRLHETSKEPDVPLGSTWLSDFPQAWAETGGMGLAVRQAPLIIPLKATSTPVSIKQYPMSQEARLGIKPHIQRLLDQGILVPCQSPWNTPLLPVKKPGTNDYRPVQDLREVNKRVEDIHPTVPNPYNLLSGLPPSHQWYTVLDLKDAFFCLRLHPTSQPLFAFEWRDPEMGISGQLTWTRLPQGFKNSPTLFDEALHRDLADFRIQHPDLILLQYVDDLLLAATSEQDCQRGTRALLQTLGNLGYRASAKKAQICQKQVKYLGYLLKEGQRWLTEARKETVMGQPTPKTPRQLREFLGTAGFCRLWIPGFAEMAAPLYPLTKTGTLFNWGPDQQKAYQEIKQALLTAPALGLPDLTKPFELFVDEKQGYAKGVLTQKLGPWRRPVAYLSKKLDPVAAGWPPCLRMVAAIAVLTKDAGKLTMGQPLVILAPHAVEALVKQPPDRWLSNARMTHYQAMLLDTDRVQFGPVVALNPATLLPLPEKEAPHDCLEILAETHGTRPDLTDQPIPDADYTWYTDGSSFLQEGQRRAGAAVTTETEVIWARALPAGTSAQRAELIALTQALKMAEGKKLNVYTDSRYAFATAHVHGEIYRRRGLLTSEGREIKNKNEILALLKALFLPKRLSIIHCPGHQKGNSAEARGNRMADQAAREAAMKAVLETSTLLAGKRTADGSEFEKRTADGSEFESPKKKAKVE

SEQ ID NO: 7567 - protein, 2096 aa, synthetic construct
MPAAKRVKLDGGDKKYSIGLDIGTNSVGWAVITDEYKVPSKKFKVLGNTDRHSIKKNLIGALLFDSGETAEATRLKRTARRRYTRRKNRICYLQEIFSNEMAKVDDSFFHRLEESFLVEEDKKHERHPIFGNIVDEVAYHEKYPTIYHLRKKLVDSTDKADLRLIYLALAHMIKFRGHFLIEGDLNPDNSDVDKLFIQLVQTYNQLFEENPINASGVDAKAILSARLSKSRRLENLIAQLPGEKKNGLFGNLIALSLGLTPNFKSNFDLAEDAKLQLSKDTYDDDLDNLLAQIGDQYADLFLAAKNLSDAILLSDILRVNTEITKAPLSASMIKRYDEHHQDLTLLKALVRQQLPEKYKEIFFDQSKNGYAGYIDGGASQEEFYKFIKPILEKMDGTEELLVKLNREDLLRKQRTFDNGSIPHQIHLGELHAILRRQEDFYPFLKDNREKIEKILTFRIPYYVGPLARGNSRFAWMTRKSEETITPWNFEEVVDKGASAQSFIERMTNFDKNLPNEKVLPKHSLLYEYFTVYNELTKVKYVTEGMRKPAFLSGEQKKAIVDLLFKTNRKVTVKQLKEDYFKKIECFDSVEISGVEDRFNASLGTYHDLLKIIKDKDFLDNEENEDILEDIVLTLTLFEDREMIEERLKTYAHLFDDKVMKQLKRRRYTGWGRLSRKLINGIRDKQSGKTILDFLKSDGFANRNFMQLIHDDSLTFKEDIQKAQVSGQGDSLHEHIANLAGSPAIKKGILQTVKVVDELVKVMGRHKPENIVIEMARENQTTQKGQKNSRERMKRIEEGIKELGSQILKEHPVENTQLQNEKLYLYYLQNGRDMYVDQELDINRLSDYDVDHIVPQSFLKDDSIDNKVLTRSDKARGKSDNVPSEEVVKKMKNYWRQLLNAKLITQRKFDNLTKAERGGLSELDKAGFIKRQLVETRQITKHVAQILDSRMNTKYDENDKLIREVKVITLKSKLVSDFRKDFQFYKVREINNYHHAHDAYLNAVVGTALIKKYPKLESEFVYGDYKVYDVRKMIAKSEQEIGKATAKYFFYSNIMNFFKTEITLANGEIRKRPLIETNGETGEIVWDKGRDFATVRKVLSMPQVNIVKKTEVQTGGFSKESILPKRNSDKLIARKKDWDPKKYGGFDSPTVAYSVLVVAKVEKGKSKKLKSVKELLGITIMERSSFEKNPIDFLEAKGYKEVKKDLIIKLPKYSLFELENGRKRMLASAGELQKGNELALPSKYVNFLYLASHYEKLKGSPEDNEQKQLFVEQHKHYLDEIIEQISEFSKRVILADANLDKVLSAYNKHRDKPIREQAENIIHLFTLTNLGAPAAFKYFDTTIDRKRYTSTKEVLDATLIHQSITGLYETRIDLSQLGGDGGPAPEAAAKGGGGGTLNIEDEYRLHETSKEPDVPLGSTWLSDFPQAWAETGGMGLAVRQAPLIIPLKATSTPVSIKQYPMSQEARLGIKPHIQRLLDQGILVPCQSPWNTPLLPVKKPGTNDYRPVQDLREVNKRVEDIHPTVPNPYNLLSGLPPSHQWYTVLDLKDAFFCLRLHPTSQPLFAFEWRDPEMGISGQLTWTRLPQGFKNSPTLFNEALHRDLADFRIQHPDLILLQYVDDLLLAATSEQDCQRGTRALLQTLGNLGYRASAKKAQICQKQVKYLGYLLKEGQRWLTEARKETVMGQPTPKTPRQLREFLGTAGFCRLWIPGFAEMAAPLYPLTKPGTLFNWGPDQQKAYQEIKQALLTAPALGLPDLTKPFELFVDEKQGYAKGVLTQKLGPWRRPVAYLSKKLDPVAAGWPPCLRMVAAIAVLTKDAGKLTMGQPLVILAPHAVEALVKQPPDRWLSNARMTHYQAMLLDTDRVQFGPVVALNPATLLPLPEKEAPHDCLEILAETHGTRPDLTDQPIPDADYTWYTDGSSFLQEGQRRAGAAVTTETEVIWARALPAGTSAQRAELIALTQALKMAEGKKLNVYTDSRYAFATAHVHGEIYRRRGWLTSEGREIKNKNEILALLKALFLPKRLSIIHCPGHQKGNSAEARGNRMADQAAREAAMKAVLETSTLLAGKRTADGSEFEKRTADGSEFESPKKKAKVE

SEQ ID NO: 7568 - protein, 2096 aa, synthetic construct
MPAAKRVKLDGGDKKYSIGLDIGTNSVGWAVITDEYKVPSKKFKVLGNTDRHSIKKNLIGALLFDSGETAEATRLKRTARRRYTRRKNRICYLQEIFSNEMAKVDDSFFHRLEESFLVEEDKKHERHPIFGNIVDEVAYHEKYPTIYHLRKKLVDSTDKADLRLIYLALAHMIKFRGHFLIEGDLNPDNSDVDKLFIQLVQTYNQLFEENPINASGVDAKAILSARLSKSRRLENLIAQLPGEKKNGLFGNLIALSLGLTPNFKSNFDLAEDAKLQLSKDTYDDDLDNLLAQIGDQYADLFLAAKNLSDAILLSDILRVNTEITKAPLSASMIKRYDEHHQDLTLLKALVRQQLPEKYKEIFFDQSKNGYAGYIDGGASQEEFYKFIKPILEKMDGTEELLVKLNREDLLRKQRTFDNGSIPHQIHLGELHAILRRQEDFYPFLKDNREKIEKILTFRIPYYVGPLARGNSRFAWMTRKSEETITPWNFEEVVDKGASAQSFIERMTNFDKNLPNEKVLPKHSLLYEYFTVYNELTKVKYVTEGMRKPAFLSGEQKKAIVDLLFKTNRKVTVKQLKEDYFKKIECFDSVEISGVEDRFNASLGTYHDLLKIIKDKDFLDNEENEDILEDIVLTLTLFEDREMIEERLKTYAHLFDDKVMKQLKRRRYTGWGRLSRKLINGIRDKQSGKTILDFLKSDGFANRNFMQLIHDDSLTFKEDIQKAQVSGQGDSLHEHIANLAGSPAIKKGILQTVKVVDELVKVMGRHKPENIVIEMARENQTTQKGQKNSRERMKRIEEGIKELGSQILKEHPVENTQLQNEKLYLYYLQNGRDMYVDQELDINRLSDYDVDHIVPQSFLKDDSIDNKVLTRSDKARGKSDNVPSEEVVKKMKNYWRQLLNAKLITQRKFDNLTKAERGGLSELDKAGFIKRQLVETRQITKHVAQILDSRMNTKYDENDKLIREVKVITLKSKLVSDFRKDFQFYKVREINNYHHAHDAYLNAVVGTALIKKYPKLESEFVYGDYKVYDVRKMIAKSEQEIGKATAKYFFYSNIMNFFKTEITLANGEIRKRPLIETNGETGEIVWDKGRDFATVRKVLSMPQVNIVKKTEVQTGGFSKESILPKRNSDKLIARKKDWDPKKYGGFDSPTVAYSVLVVAKVEKGKSKKLKSVKELLGITIMERSSFEKNPIDFLEAKGYKEVKKDLIIKLPKYSLFELENGRKRMLASAGELQKGNELALPSKYVNFLYLASHYEKLKGSPEDNEQKQLFVEQHKHYLDEIIEQISEFSKRVILADANLDKVLSAYNKHRDKPIREQAENIIHLFTLTNLGAPAAFKYFDTTIDRKRYTSTKEVLDATLIHQSITGLYETRIDLSQLGGDGGPAPEAAAKGGGGGTLNIEDEYRLHETSKEPDVPLGSTWLSDFPQAWAETGGMGLAVRQAPLIIPLKATSTPVSIKQYPMSQEARLGIKPHIQRLLDQGILVPCQSPWNTPLLPVKKPGTNDYRPVQDLREVNKRVEDIHPTVPNPYNLLSGLPPSHQWYTVLDLKDAFFCLRLHPTSQPLFAFEWRDPEMGISGQLTWTRLPQGFKNSPTLFNEALHRDLADFRIQHPDLILLQYVDDLLLAATSEQDCQRGTRALLQTLGNLGYRASAKKAQICQKQVKYLGYLLKEGQRWLTEARKETVMGQPTPKTPRQLREFLGKAGFCRLFIPGFAEMAAPLYPLTKPGTLFNWGPDQQKAYQEIKQALLTAPALGLPDLTKPFELFVDEKQGYAKGVLTQKLGPWRRPVAYLSKKLDPVAAGWPPCLRMVAAIAVLTKDAGKLTMGQPLVILAPHAVEALVKQPPDRWLSNARMTHYQAMLLDTDRVQFGPVVALNPATLLPLPEKEAPHDCLEILAETHGTRPDLTDQPIPDADYTWYTDGSSFLQEGQRRAGAAVTTETEVIWARALPAGTSAQRAELIALTQALKMAEGKKLNVYTDSRYAFATAHVHGEIYRRRGWLTSEGREIKNKNEILALLKALFLPKRLSIIHCPGHQKGNSAEARGNRMADQAAREAAMKAVLETSTLLAGKRTADGSEFEKRTADGSEFESPKKKAKVE

SEQ ID NO: 7569 - protein, 2098 aa, synthetic construct
MPAAKRVKLDGGDKKYSIGLDIGTNSVGWAVITDEYKVPSKKFKVLGNTDRHSIKKNLIGALLFDSGETAEATRLKRTARRRYTRRKNRICYLQEIFSNEMAKVDDSFFHRLEESFLVEEDKKHERHPIFGNIVDEVAYHEKYPTIYHLRKKLVDSTDKADLRLIYLALAHMIKFRGHFLIEGDLNPDNSDVDKLFIQLVQTYNQLFEENPINASGVDAKAILSARLSKSRRLENLIAQLPGEKKNGLFGNLIALSLGLTPNFKSNFDLAEDAKLQLSKDTYDDDLDNLLAQIGDQYADLFLAAKNLSDAILLSDILRVNTEITKAPLSASMIKRYDEHHQDLTLLKALVRQQLPEKYKEIFFDQSKNGYAGYIDGGASQEEFYKFIKPILEKMDGTEELLVKLNREDLLRKQRTFDNGSIPHQIHLGELHAILRRQEDFYPFLKDNREKIEKILTFRIPYYVGPLARGNSRFAWMTRKSEETITPWNFEEVVDKGASAQSFIERMTNFDKNLPNEKVLPKHSLLYEYFTVYNELTKVKYVTEGMRKPAFLSGEQKKAIVDLLFKTNRKVTVKQLKEDYFKKIECFDSVEISGVEDRFNASLGTYHDLLKIIKDKDFLDNEENEDILEDIVLTLTLFEDREMIEERLKTYAHLFDDKVMKQLKRRRYTGWGRLSRKLINGIRDKQSGKTILDFLKSDGFANRNFMQLIHDDSLTFKEDIQKAQVSGQGDSLHEHIANLAGSPAIKKGILQTVKVVDELVKVMGRHKPENIVIEMARENQTTQKGQKNSRERMKRIEEGIKELGSQILKEHPVENTQLQNEKLYLYYLQNGRDMYVDQELDINRLSDYDVDHIVPQSFLKDDSIDNKVLTRSDKARGKSDNVPSEEVVKKMKNYWRQLLNAKLITQRKFDNLTKAERGGLSELDKAGFIKRQLVETRQITKHVAQILDSRMNTKYDENDKLIREVKVITLKSKLVSDFRKDFQFYKVREINNYHHAHDAYLNAVVGTALIKKYPKLESEFVYGDYKVYDVRKMIAKSEQEIGKATAKYFFYSNIMNFFKTEITLANGEIRKRPLIETNGETGEIVWDKGRDFATVRKVLSMPQVNIVKKTEVQTGGFSKESILPKRNSDKLIARKKDWDPKKYGGFDSPTVAYSVLVVAKVEKGKSKKLKSVKELLGITIMERSSFEKNPIDFLEAKGYKEVKKDLIIKLPKYSLFELENGRKRMLASAGELQKGNELALPSKYVNFLYLASHYEKLKGSPEDNEQKQLFVEQHKHYLDEIIEQISEFSKRVILADANLDKVLSAYNKHRDKPIREQAENIIHLFTLTNLGAPAAFKYFDTTIDRKRYTSTKEVLDATLIHQSITGLYETRIDLSQLGGDGGGSSEAAAKPAPGGTAPLEEEYRLFLEAPIQNVTLLEQWKREIPKVWAEINPPGLASTQAPIHVQLLSTALPVRVRQYPITLEAKRSLRETIRKFRAAGILRPVHSPWNTPLLPVRKSGTSEYRMVQDLREVNKRVETIHPTVPNPYTLLSLLPPDRIWYSVLDLKDAFFCIPLAPESQLIFAFEWADAEEGESGQLTWTRLPQGFKNSPTLFNEALNRDLQGFRLDHPSVSLLQYVDDLLIAADTQAACLSATRDLLMTLAELGYRVSGKKAQLCQEEVTYLGFKIHKGSRSLSNSRTQAILQIPVPKTKRQVREFLGTIGYCRLWIPGFAELAQPLYAATRPGNDPLVWGEKEEEAFQSLKLALTQPPALALPSLDKPFQLFVEETSGAAKGVLTQALGPWKRPVAYLSKRLDPVAAGWPRCLRAIAAAALLTREASKLTFGQDIEITSSHNLESLLRSPPDKWLTNARITQYQVLLLDPPRVRFKQTAALNPATLLPETDDTLPIHHCLDTLDSLTSTRPDLTDQPLAQAEATLFTDGSSYIRDGKRYAGAAVVTLDSVIWAEPLPIGTSAQKAELIALTKALEWSKDKSVNIYTDSRYAFATLHVHGMIYRERGWLTAGGKAIKNAPEILALLTAVWLPKRVAVMHCKGHQKDDAPTSTGNRRADEVAREVAIRPLSTQATISAGKRTADGSEFEKRTADGSEFESPKKKAKVE

SEQ ID NO: 7570 - protein, 2102 aa, synthetic construct
MPAAKRVKLDGGDKKYSIGLDIGTNSVGWAVITDEYKVPSKKFKVLGNTDRHSIKKNLIGALLFDSGETAEATRLKRTARRRYTRRKNRICYLQEIFSNEMAKVDDSFFHRLEESFLVEEDKKHERHPIFGNIVDEVAYHEKYPTIYHLRKKLVDSTDKADLRLIYLALAHMIKFRGHFLIEGDLNPDNSDVDKLFIQLVQTYNQLFEENPINASGVDAKAILSARLSKSRRLENLIAQLPGEKKNGLFGNLIALSLGLTPNFKSNFDLAEDAKLQLSKDTYDDDLDNLLAQIGDQYADLFLAAKNLSDAILLSDILRVNTEITKAPLSASMIKRYDEHHQDLTLLKALVRQQLPEKYKEIFFDQSKNGYAGYIDGGASQEEFYKFIKPILEKMDGTEELLVKLNREDLLRKQRTFDNGSIPHQIHLGELHAILRRQEDFYPFLKDNREKIEKILTFRIPYYVGPLARGNSRFAWMTRKSEETITPWNFEEVVDKGASAQSFIERMTNFDKNLPNEKVLPKHSLLYEYFTVYNELTKVKYVTEGMRKPAFLSGEQKKAIVDLLFKTNRKVTVKQLKEDYFKKIECFDSVEISGVEDRFNASLGTYHDLLKIIKDKDFLDNEENEDILEDIVLTLTLFEDREMIEERLKTYAHLFDDKVMKQLKRRRYTGWGRLSRKLINGIRDKQSGKTILDFLKSDGFANRNFMQLIHDDSLTFKEDIQKAQVSGQGDSLHEHIANLAGSPAIKKGILQTVKVVDELVKVMGRHKPENIVIEMARENQTTQKGQKNSRERMKRIEEGIKELGSQILKEHPVENTQLQNEKLYLYYLQNGRDMYVDQELDINRLSDYDVDHIVPQSFLKDDSIDNKVLTRSDKARGKSDNVPSEEVVKKMKNYWRQLLNAKLITQRKFDNLTKAERGGLSELDKAGFIKRQLVETRQITKHVAQILDSRMNTKYDENDKLIREVKVITLKSKLVSDFRKDFQFYKVREINNYHHAHDAYLNAVVGTALIKKYPKLESEFVYGDYKVYDVRKMIAKSEQEIGKATAKYFFYSNIMNFFKTEITLANGEIRKRPLIETNGETGEIVWDKGRDFATVRKVLSMPQVNIVKKTEVQTGGFSKESILPKRNSDKLIARKKDWDPKKYGGFDSPTVAYSVLVVAKVEKGKSKKLKSVKELLGITIMERSSFEKNPIDFLEAKGYKEVKKDLIIKLPKYSLFELENGRKRMLASAGELQKGNELALPSKYVNFLYLASHYEKLKGSPEDNEQKQLFVEQHKHYLDEIIEQISEFSKRVILADANLDKVLSAYNKHRDKPIREQAENIIHLFTLTNLGAPAAFKYFDTTIDRKRYTSTKEVLDATLIHQSITGLYETRIDLSQLGGDGGGSSEAAAKPAPGGTVSLQDEHRLFDIPVTTSLPDVWLQDFPQAWAETGGLGRAKCQAPIIIDLKPTAVPVSIKQYPMSLEAHMGIRQHIIKFLELGVLRPCRSPWNTPLLPVKKPGTQDYRPVQDLREINKRTVDIHPTVPNPYNLLSTLKPDYSWYTVLDLKDAFFCLPLAPQSQELFAFEWKDPERGISGQLTWTRLPQGFKNSPTLFNEALHRDLTDFRTQHPEVTLLQYVDDLLLAAPTKKACTQGTRHLLQELGEKGYRASAKKAQICQTKVTYLGYILSEGKRWLTPGRIETVARIPPPRNPREVREFLGTAGFCRLWIPGFAELAAPLYALTKPSTPFTWQTEHQLAFEALKKALLSAPALGLPDTSKPFTLFLDERQGIAKGVLTQKLGPWKRPVAYLSKKLDPVAAGWPPCLRIMAATAMLVKDSAKLTLGQPLTVITPHTLEAIVRQPPDRWITNARLTHYQALLLDTDRVQFGPPVTLNPATLLPVPENQPSPHDCRQVLAETHGTREDLKDQELPDADHTWYTDGSSYLDSGTRRAGAAVVDGHNTIWAQSLPPGTSAQKAELIALTKALELSKGKKANIYTDSRYAFATAHTHGSIYERRGWLTSEGKEIKNKAEIIALLKALFLPQEVAIIHCPGHQKGQDPVAVGNRQADRVARQAAMAEVLTLATEPDNTSHITAGKRTADGSEFEKRTADGSEFESPKKKAKVE

SEQ ID NO: 7571 - protein, 2173 aa, synthetic construct
MPAAKRVKLDGGDKKYSIGLDIGTNSVGWAVITDEYKVPSKKFKVLGNTDRHSIKKNLIGALLFDSGETAEATRLKRTARRRYTRRKNRICYLQEIFSNEMAKVDDSFFHRLEESFLVEEDKKHERHPIFGNIVDEVAYHEKYPTIYHLRKKLVDSTDKADLRLIYLALAHMIKFRGHFLIEGDLNPDNSDVDKLFIQLVQTYNQLFEENPINASGVDAKAILSARLSKSRRLENLIAQLPGEKKNGLFGNLIALSLGLTPNFKSNFDLAEDAKLQLSKDTYDDDLDNLLAQIGDQYADLFLAAKNLSDAILLSDILRVNTEITKAPLSASMIKRYDEHHQDLTLLKALVRQQLPEKYKEIFFDQSKNGYAGYIDGGASQEEFYKFIKPILEKMDGTEELLVKLNREDLLRKQRTFDNGSIPHQIHLGELHAILRRQEDFYPFLKDNREKIEKILTFRIPYYVGPLARGNSRFAWMTRKSEETITPWNFEEVVDKGASAQSFIERMTNFDKNLPNEKVLPKHSLLYEYFTVYNELTKVKYVTEGMRKPAFLSGEQKKAIVDLLFKTNRKVTVKQLKEDYFKKIECFDSVEISGVEDRFNASLGTYHDLLKIIKDKDFLDNEENEDILEDIVLTLTLFEDREMIEERLKTYAHLFDDKVMKQLKRRRYTGWGRLSRKLINGIRDKQSGKTILDFLKSDGFANRNFMQLIHDDSLTFKEDIQKAQVSGQGDSLHEHIANLAGSPAIKKGILQTVKVVDELVKVMGRHKPENIVIEMARENQTTQKGQKNSRERMKRIEEGIKELGSQILKEHPVENTQLQNEKLYLYYLQNGRDMYVDQELDINRLSDYDVDHIVPQSFLKDDSIDNKVLTRSDKARGKSDNVPSEEVVKKMKNYWRQLLNAKLITQRKFDNLTKAERGGLSELDKAGFIKRQLVETRQITKHVAQILDSRMNTKYDENDKLIREVKVITLKSKLVSDFRKDFQFYKVREINNYHHAHDAYLNAVVGTALIKKYPKLESEFVYGDYKVYDVRKMIAKSEQEIGKATAKYFFYSNIMNFFKTEITLANGEIRKRPLIETNGETGEIVWDKGRDFATVRKVLSMPQVNIVKKTEVQTGGFSKESILPKRNSDKLIARKKDWDPKKYGGFDSPTVAYSVLVVAKVEKGKSKKLKSVKELLGITIMERSSFEKNPIDFLEAKGYKEVKKDLIIKLPKYSLFELENGRKRMLASAGELQKGNELALPSKYVNFLYLASHYEKLKGSPEDNEQKQLFVEQHKHYLDEIIEQISEFSKRVILADANLDKVLSAYNKHRDKPIREQAENIIHLFTLTNLGAPAAFKYFDTTIDRKRYTSTKEVLDATLIHQSITGLYETRIDLSQLGGDGGGSSEAAAKPAPGGMDLLKPLTVERKGVKIKGYWNSQADITCVPKDLLQGEEPVRQQNVTTIHGTQEGDVYYVNLKIDGRRINTEVIGTTLDYAIITPGDVPWILKKPLELTIKLDLEEQQGTLLNNSILSKKGKEELKQLFEKYSALWQSWENQVGHRRIRPHKIATGTVKPTPQKQYHINPKAKPDIQIVINDLLKQGVLIQKESTMNTPVYPVPKPNGRWRMVLDYRAVNKVTPLIAVQNQHSYGILGSLFKGRYKTTIDLSNGFWAHPIVPEDYWITAFTWQGKQYCWTVLPQGFLNSPGLFNGDVVDLLQGIPNVEVYVDDVYISHDSEKEHLEYLDILFNRLKEAGYIISLKKSNIANSIVDFLGFQITNEGRGLTDTFKEKLENITAPTTLKQLQSILGLLNFARNFIPDFTELIAPLYALIPKSPKNYVPWQIEHSTTLETLITKLNGAEYLQGRKGDKTLIMKVNASYTTGYIRYYNEGEKKPISYVSIVFSKTELKFTELEKLLTTVHKGLLKALDLSMGQNIHVYSPIVSMQNIQKTPQTAKKALASRWLSWLSYLEDPRIRFFYDPQMPALKDLPAVDTGKDNKKHPSNFQHIFYTDGSAITSPTKEGHLNAGMGIVYFINKDGNLQKQQEWSISLGNHTAQFAEIAAFEFALKKCLPLGGNILVVTDSNYVAKAYNEELDVWASNGFVNNRKKPLKHISKWKSVADLKRLRPDVVVTHEPGHQKLDSSPHAYGNNLADQLATQASFKVHAGKRTADGSEFEKRTADGSEFESPKKKAKVE

SEQ ID NO: 7572 - protein, 2095 aa, synthetic construct
MPAAKRVKLDGGDKKYSIGLDIGTNSVGWAVITDEYKVPSKKFKVLGNTDRHSIKKNLIGALLFDSGETAEATRLKRTARRRYTRRKNRICYLQEIFSNEMAKVDDSFFHRLEESFLVEEDKKHERHPIFGNIVDEVAYHEKYPTIYHLRKKLVDSTDKADLRLIYLALAHMIKFRGHFLIEGDLNPDNSDVDKLFIQLVQTYNQLFEENPINASGVDAKAILSARLSKSRRLENLIAQLPGEKKNGLFGNLIALSLGLTPNFKSNFDLAEDAKLQLSKDTYDDDLDNLLAQIGDQYADLFLAAKNLSDAILLSDILRVNTEITKAPLSASMIKRYDEHHQDLTLLKALVRQQLPEKYKEIFFDQSKNGYAGYIDGGASQEEFYKFIKPILEKMDGTEELLVKLNREDLLRKQRTFDNGSIPHQIHLGELHAILRRQEDFYPFLKDNREKIEKILTFRIPYYVGPLARGNSRFAWMTRKSEETITPWNFEEVVDKGASAQSFIERMTNFDKNLPNEKVLPKHSLLYEYFTVYNELTKVKYVTEGMRKPAFLSGEQKKAIVDLLFKTNRKVTVKQLKEDYFKKIECFDSVEISGVEDRFNASLGTYHDLLKIIKDKDFLDNEENEDILEDIVLTLTLFEDREMIEERLKTYAHLFDDKVMKQLKRRRYTGWGRLSRKLINGIRDKQSGKTILDFLKSDGFANRNFMQLIHDDSLTFKEDIQKAQVSGQGDSLHEHIANLAGSPAIKKGILQTVKVVDELVKVMGRHKPENIVIEMARENQTTQKGQKNSRERMKRIEEGIKELGSQILKEHPVENTQLQNEKLYLYYLQNGRDMYVDQELDINRLSDYDVDHIVPQSFLKDDSIDNKVLTRSDKARGKSDNVPSEEVVKKMKNYWRQLLNAKLITQRKFDNLTKAERGGLSELDKAGFIKRQLVETRQITKHVAQILDSRMNTKYDENDKLIREVKVITLKSKLVSDFRKDFQFYKVREINNYHHAHDAYLNAVVGTALIKKYPKLESEFVYGDYKVYDVRKMIAKSEQEIGKATAKYFFYSNIMNFFKTEITLANGEIRKRPLIETNGETGEIVWDKGRDFATVRKVLSMPQVNIVKKTEVQTGGFSKESILPKRNSDKLIARKKDWDPKKYGGFDSPTVAYSVLVVAKVEKGKSKKLKSVKELLGITIMERSSFEKNPIDFLEAKGYKEVKKDLIIKLPKYSLFELENGRKRMLASAGELQKGNELALPSKYVNFLYLASHYEKLKGSPEDNEQKQLFVEQHKHYLDEIIEQISEFSKRVILADANLDKVLSAYNKHRDKPIREQAENIIHLFTLTNLGAPAAFKYFDTTIDRKRYTSTKEVLDATLIHQSITGLYETRIDLSQLGGDGGGSSEAAAKPAPGGTLQLEEEYRLFEPESTQKQEMDIWLKNFPQAWAETGGMGTAHCQAPVLIQLKATATPISIRQYPMPHEAYQGIKPHIRRMLDQGILKPCQSPWNTPLLPVKKPGTEDYRPVQDLREVNKRVEDIHPTVPNPYNLLSTLPPSHPWYTVLDLKDAFFCLRLHSESQLLFAFEWRDPEIGLSGQLTWTRLPQGFKNSPTLFNEALHSDLADFRVRYPALVLLQYVDDLLLAAATRTECLEGTKALLETLGNKGYRASAKKAQICLQEVTYLGYSLKDGQRWLTKARKEAILSIPVPKNSRQVREFLGTAGYCRLWIPGFAELAAPLYPLTRPGTLFQWGTEQQLAFEDIKKALLSSPALGLPDITKPFELFIDENSGFAKGVLVQKLGPWKRPVAYLSKKLDTVASGWPPCLRMVAAIAILVKDAGKLTLGQPLTILTSHPVEALVRQPPNKWLSNARMTHYQAMLLDAERVHFGPTVSLNPATLLPLPSGGNHHDCLQILAETHGTRPDLTDQPLPDADLTWYTDGSSFIRNGEREAGAAVTTESEVIWAAPLPPGTSAQRAELIALTQALKMAEGKKLTVYTDSRYAFATTHVHGEIYRRRGWLTSEGKEIKNKNEILALLEALFLPKRLSIIHCPGHQKGDSPQAKGNRLADDTAKKAATETHSSLTVLPAGKRTADGSEFEKRTADGSEFESPKKKAKVE

SEQ ID NO: 7573 - protein, 2087 aa, synthetic construct
MPAAKRVKLDGGDKKYSIGLDIGTNSVGWAVITDEYKVPSKKFKVLGNTDRHSIKKNLIGALLFDSGETAEATRLKRTARRRYTRRKNRICYLQEIFSNEMAKVDDSFFHRLEESFLVEEDKKHERHPIFGNIVDEVAYHEKYPTIYHLRKKLVDSTDKADLRLIYLALAHMIKFRGHFLIEGDLNPDNSDVDKLFIQLVQTYNQLFEENPINASGVDAKAILSARLSKSRRLENLIAQLPGEKKNGLFGNLIALSLGLTPNFKSNFDLAEDAKLQLSKDTYDDDLDNLLAQIGDQYADLFLAAKNLSDAILLSDILRVNTEITKAPLSASMIKRYDEHHQDLTLLKALVRQQLPEKYKEIFFDQSKNGYAGYIDGGASQEEFYKFIKPILEKMDGTEELLVKLNREDLLRKQRTFDNGSIPHQIHLGELHAILRRQEDFYPFLKDNREKIEKILTFRIPYYVGPLARGNSRFAWMTRKSEETITPWNFEEVVDKGASAQSFIERMTNFDKNLPNEKVLPKHSLLYEYFTVYNELTKVKYVTEGMRKPAFLSGEQKKAIVDLLFKTNRKVTVKQLKEDYFKKIECFDSVEISGVEDRFNASLGTYHDLLKIIKDKDFLDNEENEDILEDIVLTLTLFEDREMIEERLKTYAHLFDDKVMKQLKRRRYTGWGRLSRKLINGIRDKQSGKTILDFLKSDGFANRNFMQLIHDDSLTFKEDIQKAQVSGQGDSLHEHIANLAGSPAIKKGILQTVKVVDELVKVMGRHKPENIVIEMARENQTTQKGQKNSRERMKRIEEGIKELGSQILKEHPVENTQLQNEKLYLYYLQNGRDMYVDQELDINRLSDYDVDHIVPQSFLKDDSIDNKVLTRSDKARGKSDNVPSEEVVKKMKNYWRQLLNAKLITQRKFDNLTKAERGGLSELDKAGFIKRQLVETRQITKHVAQILDSRMNTKYDENDKLIREVKVITLKSKLVSDFRKDFQFYKVREINNYHHAHDAYLNAVVGTALIKKYPKLESEFVYGDYKVYDVRKMIAKSEQEIGKATAKYFFYSNIMNFFKTEITLANGEIRKRPLIETNGETGEIVWDKGRDFATVRKVLSMPQVNIVKKTEVQTGGFSKESILPKRNSDKLIARKKDWDPKKYGGFDSPTVAYSVLVVAKVEKGKSKKLKSVKELLGITIMERSSFEKNPIDFLEAKGYKEVKKDLIIKLPKYSLFELENGRKRMLASAGELQKGNELALPSKYVNFLYLASHYEKLKGSPEDNEQKQLFVEQHKHYLDEIIEQISEFSKRVILADANLDKVLSAYNKHRDKPIREQAENIIHLFTLTNLGAPAAFKYFDTTIDRKRYTSTKEVLDATLIHQSITGLYETRIDLSQLGGDGGGSSEAAAKPAPGGVPWLTQQPLQLTILVPLQEYQEKILSKTALPEDQKQQLKTLFVKYDNLWQHWENQVGHRKIRPHNIATGDYPPRPQKQYPINPKAKPSIQIVIDDLLKQGVLTPQNSTMNTPVYPVPKPDGRWRMVLDYREVNKTIPLTAAQNQHSAGILATIVRQKYKTTLDLANGFWAHPITPESYWLTAFTWQGKQYCWTRLPQGFLNSPALFNADVVDLLKEIPNVQVYVDDIYLSHDDPKEHVQQLEKVFQILLQAGYVVSLKKSEIGQKTVEFLGFNITKEGRGLTDTFKTKLLNITPPKDLKQLQSILGKLNFARNFIPNFAELVQPLYNLIAPAKGKYIEWSEENTKQLNMVIEALNTASNLEERLPEQRLVIKVNTSPSAGYVRYYNETGKKPIMYLNYVFSKAELKFSMLEKLLTTMHKALIKAMDLAMGQEILVYSPIVSMTKIQKTPLPERKALPIRWITWMTYLEDPRIQFHYDKTLPELKHIPDVYTSSQSPVKHPSQYEGVFYTDGSAIKSPDPTKSNNAGMGIVHATYKPEYQVLNQWSIPLGNHTAQMAEIAAVEFACKKALKIPGPVLVITDSFYVAESANKELPYWKSNGFVNNKKKPLKHISKWKSIAECLSMKPDITIQHEKGISLQIPVFILKGNALADKLATQGSYVVNAGKRTADGSEFEKRTADGSEFESPKKKAKVE

SEQ ID NO: 7574 - protein, 2127 aa, synthetic construct
MPAAKRVKLDGGDKKYSIGLDIGTNSVGWAVITDEYKVPSKKFKVLGNTDRHSIKKNLIGALLFDSGETAEATRLKRTARRRYTRRKNRICYLQEIFSNEMAKVDDSFFHRLEESFLVEEDKKHERHPIFGNIVDEVAYHEKYPTIYHLRKKLVDSTDKADLRLIYLALAHMIKFRGHFLIEGDLNPDNSDVDKLFIQLVQTYNQLFEENPINASGVDAKAILSARLSKSRRLENLIAQLPGEKKNGLFGNLIALSLGLTPNFKSNFDLAEDAKLQLSKDTYDDDLDNLLAQIGDQYADLFLAAKNLSDAILLSDILRVNTEITKAPLSASMIKRYDEHHQDLTLLKALVRQQLPEKYKEIFFDQSKNGYAGYIDGGASQEEFYKFIKPILEKMDGTEELLVKLNREDLLRKQRTFDNGSIPHQIHLGELHAILRRQEDFYPFLKDNREKIEKILTFRIPYYVGPLARGNSRFAWMTRKSEETITPWNFEEVVDKGASAQSFIERMTNFDKNLPNEKVLPKHSLLYEYFTVYNELTKVKYVTEGMRKPAFLSGEQKKAIVDLLFKTNRKVTVKQLKEDYFKKIECFDSVEISGVEDRFNASLGTYHDLLKIIKDKDFLDNEENEDILEDIVLTLTLFEDREMIEERLKTYAHLFDDKVMKQLKRRRYTGWGRLSRKLINGIRDKQSGKTILDFLKSDGFANRNFMQLIHDDSLTFKEDIQKAQVSGQGDSLHEHIANLAGSPAIKKGILQTVKVVDELVKVMGRHKPENIVIEMARENQTTQKGQKNSRERMKRIEEGIKELGSQILKEHPVENTQLQNEKLYLYYLQNGRDMYVDQELDINRLSDYDVDHIVPQSFLKDDSIDNKVLTRSDKARGKSDNVPSEEVVKKMKNYWRQLLNAKLITQRKFDNLTKAERGGLSELDKAGFIKRQLVETRQITKHVAQILDSRMNTKYDENDKLIREVKVITLKSKLVSDFRKDFQFYKVREINNYHHAHDAYLNAVVGTALIKKYPKLESEFVYGDYKVYDVRKMIAKSEQEIGKATAKYFFYSNIMNFFKTEITLANGEIRKRPLIETNGETGEIVWDKGRDFATVRKVLSMPQVNIVKKTEVQTGGFSKESILPKRNSDKLIARKKDWDPKKYGGFDSPTVAYSVLVVAKVEKGKSKKLKSVKELLGITIMERSSFEKNPIDFLEAKGYKEVKKDLIIKLPKYSLFELENGRKRMLASAGELQKGNELALPSKYVNFLYLASHYEKLKGSPEDNEQKQLFVEQHKHYLDEIIEQISEFSKRVILADANLDKVLSAYNKHRDKPIREQAENIIHLFTLTNLGAPAAFKYFDTTIDRKRYTSTKEVLDATLIHQSITGLYETRIDLSQLGGDGGGSSEAAAKPAPGGLLGRDLLTKLKAQIQFSTEGPQVTWEDRPAMCLVLNLEEEYRLHEKPVPPSIDPSWLQLFPMVWAEKAGMGLANQVPPVVVELKSDASPVAVRQYPMSKEAREGIRPHIQRFLDLGILVPCQSPWNTPLLPVKKPGTNDYRPVQDLREVNKRVQDIHPTVPNPYNLLSSLPPSHTWYSVLDLKDAFFCLKLHPNSQPLFAFEWRDPEKGNTGQLTWTRLPQGFKNSPTLFNEALHRDLASFRALNPQVVMLQYVDDLLVAAPTYRDCKEGTRRLLQELSKLGYRVSAKKAQLCREEVTYLGYLLKGGKRWLTPARKATVMKIPTPTTPRQVREFLGTAGFCRLWIPGFASLAAPLYPLTRPKVPFTWTEAHQEAFGRIKEALLSAPALALPDLTKPFALYVDEKEGVARGVLTQTLGPWRRPVAYLSKKLDPVASGWPTCLKAIAAVALLLKDADKLTLGQNVLVIAPHNLESIVRQPPDRWMTNARMTHYQSLLLNERVSFAPPAILNPATLLPVESDDTPIHICSEILAEETGTRPDLRDQPLPGVPAWYTDGSSFIMDGRRQAGAAIVDNKRTVWASNLPEGTSAQKAELIALTQALRLAEGKSINIYTDSRYAFATAHVHGAIYKQRGWLTSAGKDIKNKEEILALLEAIHLPKRVAIIHCPGHQRGTDPVATGNRKADEAAKQAAQSTRILTETTKNAGKRTADGSEFEKRTADGSEFESPKKKAKVE

SEQ ID NO: 7575 - protein, 2218 aa, synthetic construct
MPAAKRVKLDGGDKKYSIGLDIGTNSVGWAVITDEYKVPSKKFKVLGNTDRHSIKKNLIGALLFDSGETAEATRLKRTARRRYTRRKNRICYLQEIFSNEMAKVDDSFFHRLEESFLVEEDKKHERHPIFGNIVDEVAYHEKYPTIYHLRKKLVDSTDKADLRLIYLALAHMIKFRGHFLIEGDLNPDNSDVDKLFIQLVQTYNQLFEENPINASGVDAKAILSARLSKSRRLENLIAQLPGEKKNGLFGNLIALSLGLTPNFKSNFDLAEDAKLQLSKDTYDDDLDNLLAQIGDQYADLFLAAKNLSDAILLSDILRVNTEITKAPLSASMIKRYDEHHQDLTLLKALVRQQLPEKYKEIFFDQSKNGYAGYIDGGASQEEFYKFIKPILEKMDGTEELLVKLNREDLLRKQRTFDNGSIPHQIHLGELHAILRRQEDFYPFLKDNREKIEKILTFRIPYYVGPLARGNSRFAWMTRKSEETITPWNFEEVVDKGASAQSFIERMTNFDKNLPNEKVLPKHSLLYEYFTVYNELTKVKYVTEGMRKPAFLSGEQKKAIVDLLFKTNRKVTVKQLKEDYFKKIECFDSVEISGVEDRFNASLGTYHDLLKIIKDKDFLDNEENEDILEDIVLTLTLFEDREMIEERLKTYAHLFDDKVMKQLKRRRYTGWGRLSRKLINGIRDKQSGKTILDFLKSDGFANRNFMQLIHDDSLTFKEDIQKAQVSGQGDSLHEHIANLAGSPAIKKGILQTVKVVDELVKVMGRHKPENIVIEMARENQTTQKGQKNSRERMKRIEEGIKELGSQILKEHPVENTQLQNEKLYLYYLQNGRDMYVDQELDINRLSDYDVDHIVPQSFLKDDSIDNKVLTRSDKARGKSDNVPSEEVVKKMKNYWRQLLNAKLITQRKFDNLTKAERGGLSELDKAGFIKRQLVETRQITKHVAQILDSRMNTKYDENDKLIREVKVITLKSKLVSDFRKDFQFYKVREINNYHHAHDAYLNAVVGTALIKKYPKLESEFVYGDYKVYDVRKMIAKSEQEIGKATAKYFFYSNIMNFFKTEITLANGEIRKRPLIETNGETGEIVWDKGRDFATVRKVLSMPQVNIVKKTEVQTGGFSKESILPKRNSDKLIARKKDWDPKKYGGFDSPTVAYSVLVVAKVEKGKSKKLKSVKELLGITIMERSSFEKNPIDFLEAKGYKEVKKDLIIKLPKYSLFELENGRKRMLASAGELQKGNELALPSKYVNFLYLASHYEKLKGSPEDNEQKQLFVEQHKHYLDEIIEQISEFSKRVILADANLDKVLSAYNKHRDKPIREQAENIIHLFTLTNLGAPAAFKYFDTTIDRKRYTSTKEVLDATLIHQSITGLYETRIDLSQLGGDGGGSSEAAAKPAPGGTLGDQGSRGSDPLPEPRVTLTVEGIPTEFLVNTGAEHSVLTKPMGKMGSKRTVVAGATGSKVYPWTTKRLLKIGQKQVTHSFLVIPECPAPLLGRDLLTKLKAQIQFSTEGPQVTWEDRPAMCLVLNLEEEYRLHEKPVPPSIDPSWLQLFPMVWAEKAGMGLANQVPPVVVELKSDASPVAVRQYPMSKEAREGIRPHIQRFLDLGILVPCQSPWNTPLLPVKKPGTNDYRPVQDLREVNKRVQDIHPTVPNPYNLLSSLPPSHTWYSVLDLKDAFFCLKLHPNSQPLFAFEWRDPEKGNTGQLTWTRLPQGFKNSPTLFNEALHRDLASFRALNPQVVMLQYVDDLLVAAPTYRDCKEGTRRLLQELSKLGYRVSAKKAQLCREEVTYLGYLLKGGKRWLTPARKATVMKIPTPTTPRQVREFLGTAGFCRLWIPGFASLAAPLYPLTRPKVPFTWTEAHQEAFGRIKEALLSAPALALPDLTKPFALYVDEKEGVARGVLTQTLGPWRRPVAYLSKKLDPVASGWPTCLKAIAAVALLLKDADKLTLGQNVLVIAPHNLESIVRQPPDRWMTNARMTHYQSLLLNERVSFAPPAILNPATLLPVESDDTPIHICSEILAEETGTRPDLRDQPLPGVPAWYTDGSSFIMDGRRQAGAAIVDNKRTVWASNLPEGTSAQKAELIALTQALRLAEGKSINIYTDSRYAFATAHVHGAIYKQRGWLTSAGKDIKNKEEILALLEAIHLPKRVAIIHCPGHQRGTDPVATGNRKADEAAKQAAQSTRILTETTKNAGKRTADGSEFEKRTADGSEFESPKKKAKVE

SEQ ID NO: 7576 - protein, 2218 aa, synthetic construct
MPAAKRVKLDGGDKKYSIGLDIGTNSVGWAVITDEYKVPSKKFKVLGNTDRHSIKKNLIGALLFDSGETAEATRLKRTARRRYTRRKNRICYLQEIFSNEMAKVDDSFFHRLEESFLVEEDKKHERHPIFGNIVDEVAYHEKYPTIYHLRKKLVDSTDKADLRLIYLALAHMIKFRGHFLIEGDLNPDNSDVDKLFIQLVQTYNQLFEENPINASGVDAKAILSARLSKSRRLENLIAQLPGEKKNGLFGNLIALSLGLTPNFKSNFDLAEDAKLQLSKDTYDDDLDNLLAQIGDQYADLFLAAKNLSDAILLSDILRVNTEITKAPLSASMIKRYDEHHQDLTLLKALVRQQLPEKYKEIFFDQSKNGYAGYIDGGASQEEFYKFIKPILEKMDGTEELLVKLNREDLLRKQRTFDNGSIPHQIHLGELHAILRRQEDFYPFLKDNREKIEKILTFRIPYYVGPLARGNSRFAWMTRKSEETITPWNFEEVVDKGASAQSFIERMTNFDKNLPNEKVLPKHSLLYEYFTVYNELTKVKYVTEGMRKPAFLSGEQKKAIVDLLFKTNRKVTVKQLKEDYFKKIECFDSVEISGVEDRFNASLGTYHDLLKIIKDKDFLDNEENEDILEDIVLTLTLFEDREMIEERLKTYAHLFDDKVMKQLKRRRYTGWGRLSRKLINGIRDKQSGKTILDFLKSDGFANRNFMQLIHDDSLTFKEDIQKAQVSGQGDSLHEHIANLAGSPAIKKGILQTVKVVDELVKVMGRHKPENIVIEMARENQTTQKGQKNSRERMKRIEEGIKELGSQILKEHPVENTQLQNEKLYLYYLQNGRDMYVDQELDINRLSDYDVDHIVPQSFLKDDSIDNKVLTRSDKARGKSDNVPSEEVVKKMKNYWRQLLNAKLITQRKFDNLTKAERGGLSELDKAGFIKRQLVETRQITKHVAQILDSRMNTKYDENDKLIREVKVITLKSKLVSDFRKDFQFYKVREINNYHHAHDAYLNAVVGTALIKKYPKLESEFVYGDYKVYDVRKMIAKSEQEIGKATAKYFFYSNIMNFFKTEITLANGEIRKRPLIETNGETGEIVWDKGRDFATVRKVLSMPQVNIVKKTEVQTGGFSKESILPKRNSDKLIARKKDWDPKKYGGFDSPTVAYSVLVVAKVEKGKSKKLKSVKELLGITIMERSSFEKNPIDFLEAKGYKEVKKDLIIKLPKYSLFELENGRKRMLASAGELQKGNELALPSKYVNFLYLASHYEKLKGSPEDNEQKQLFVEQHKHYLDEIIEQISEFSKRVILADANLDKVLSAYNKHRDKPIREQAENIIHLFTLTNLGAPAAFKYFDTTIDRKRYTSTKEVLDATLIHQSITGLYETRIDLSQLGGDGGGSSEAAAKPAPGGTLGDQGSRGSDPLPEPRVTLTVEGIPTEFLVNTGAEHSVLTKPMGKMGSKRTVVAGATGSKVYPWTTKRLLKIGQKQVTHSFLVIPECPAPLLGRDLLTKLKAQIQFSTEGPQVTWEDRPAMCLVLNLEEEYRLHEKPVPPSIDPSWLQLFPMVWAEKAGMGLANQVPPVVVELKSDASPVAVRQYPMSKEAREGIRPHIQRFLDLGILVPCQSPWNTPLLPVKKPGTNDYRPVQDLREVNKRVQDIHPTVPNPYNLLSSLPPSHTWYSVLDLKDAFFCLKLHPNSQPLFAFEWRDPEKGNTGQLTWTRLPQGFKNSPTLFNEALHRDLASFRALNPQVVMLQYVDDLLVAAPTYRDCKEGTRRLLQELSKLGYRVSAKKAQLCREEVTYLGYLLKGGKRWLTPARKATVMKIPTPTTPRQVREFLGKAGFCRLFIPGFASLAAPLYPLTRPKVPFTWTEAHQEAFGRIKEALLSAPALALPDLTKPFALYVDEKEGVARGVLTQTLGPWRRPVAYLSKKLDPVASGWPTCLKAIAAVALLLKDADKLTLGQNVLVIAPHNLESIVRQPPDRWMTNARMTHYQSLLLNERVSFAPPAILNPATLLPVESDDTPIHICSEILAEETGTRPDLRDQPLPGVPAWYTDGSSFIMDGRRQAGAAIVDNKRTVWASNLPEGTSAQKAELIALTQALRLAEGKSINIYTDSRYAFATAHVHGAIYKQRGWLTSAGKDIKNKEEILALLEAIHLPKRVAIIHCPGHQRGTDPVATGNRKADEAAKQAAQSTRILTETTKNAGKRTADGSEFEKRTADGSEFESPKKKAKVE

SEQ ID NO: 7577 - protein, 2096 aa, synthetic construct
MPAAKRVKLDGGDKKYSIGLDIGTNSVGWAVITDEYKVPSKKFKVLGNTDRHSIKKNLIGALLFDSGETAEATRLKRTARRRYTRRKNRICYLQEIFSNEMAKVDDSFFHRLEESFLVEEDKKHERHPIFGNIVDEVAYHEKYPTIYHLRKKLVDSTDKADLRLIYLALAHMIKFRGHFLIEGDLNPDNSDVDKLFIQLVQTYNQLFEENPINASGVDAKAILSARLSKSRRLENLIAQLPGEKKNGLFGNLIALSLGLTPNFKSNFDLAEDAKLQLSKDTYDDDLDNLLAQIGDQYADLFLAAKNLSDAILLSDILRVNTEITKAPLSASMIKRYDEHHQDLTLLKALVRQQLPEKYKEIFFDQSKNGYAGYIDGGASQEEFYKFIKPILEKMDGTEELLVKLNREDLLRKQRTFDNGSIPHQIHLGELHAILRRQEDFYPFLKDNREKIEKILTFRIPYYVGPLARGNSRFAWMTRKSEETITPWNFEEVVDKGASAQSFIERMTNFDKNLPNEKVLPKHSLLYEYFTVYNELTKVKYVTEGMRKPAFLSGEQKKAIVDLLFKTNRKVTVKQLKEDYFKKIECFDSVEISGVEDRFNASLGTYHDLLKIIKDKDFLDNEENEDILEDIVLTLTLFEDREMIEERLKTYAHLFDDKVMKQLKRRRYTGWGRLSRKLINGIRDKQSGKTILDFLKSDGFANRNFMQLIHDDSLTFKEDIQKAQVSGQGDSLHEHIANLAGSPAIKKGILQTVKVVDELVKVMGRHKPENIVIEMARENQTTQKGQKNSRERMKRIEEGIKELGSQILKEHPVENTQLQNEKLYLYYLQNGRDMYVDQELDINRLSDYDVDHIVPQSFLKDDSIDNKVLTRSDKARGKSDNVPSEEVVKKMKNYWRQLLNAKLITQRKFDNLTKAERGGLSELDKAGFIKRQLVETRQITKHVAQILDSRMNTKYDENDKLIREVKVITLKSKLVSDFRKDFQFYKVREINNYHHAHDAYLNAVVGTALIKKYPKLESEFVYGDYKVYDVRKMIAKSEQEIGKATAKYFFYSNIMNFFKTEITLANGEIRKRPLIETNGETGEIVWDKGRDFATVRKVLSMPQVNIVKKTEVQTGGFSKESILPKRNSDKLIARKKDWDPKKYGGFDSPTVAYSVLVVAKVEKGKSKKLKSVKELLGITIMERSSFEKNPIDFLEAKGYKEVKKDLIIKLPKYSLFELENGRKRMLASAGELQKGNELALPSKYVNFLYLASHYEKLKGSPEDNEQKQLFVEQHKHYLDEIIEQISEFSKRVILADANLDKVLSAYNKHRDKPIREQAENIIHLFTLTNLGAPAAFKYFDTTIDRKRYTSTKEVLDATLIHQSITGLYETRIDLSQLGGDGGGSSEAAAKPAPGGTLNLEDEYRLYETSAEPEVSPGSTWLSDFPQAWAETGGMGLAVRQAPLIIPLKATSTPVSIKQYPMSQEAKLGIKPHIQRLLDQGILVPCQSPWNTPLLPVKKPGTNDYRPVQDLREVNKRVEDIHPTVPNPYNLLSGLPPSHRWYTVLDLKDAFFCLRLHPTSQPLFAFEWRDPGMGISGQLTWTRLPQGFKNSPTLFNEALHRDLADFRIQHPDLILLQYVDDILLAATSELDCQQGTRALLLTLGNLGYRASAKKAQLCQKQVKYLGYLLKEGQRWLTEARKETVMGQPTPKTPRQLREFLGTAGFCRLWIPGFAEMAAPLYPLTKPGTLFNWGPDQQKAYQEIKQALLTAPALGLPDLTKPFELFVDEKQGYAKGVLTQKLGPWRRPVAYLSKKLDPVAAGWPPCLRMVAAIAVLRKDAGKLTMGQPLVILAPHAVEALVKQPPDRWLSNARMTHYQAMLLDTDRVQFGPVVALNPATLLPLPEEGAPHDCLEILAETHGTRPDLTDQPIPDADHTWYTDGSSFLQEGQRKAGAAVTTETEVIWARALPAGTSAQRAELIALTQALKMAEGKRLNVYTDSRYAFATAHIHGEIYRRRGWLTSEGREIKNKSEILALLKALFLPKRLSIIHCLGHQKGDSAEARGNRLADQAAREAAIKTPPDTSTLLAGKRTADGSEFEKRTADGSEFESPKKKAKVE

SEQ ID NO: 7578 - protein, 2096 aa, synthetic construct
MPAAKRVKLDGGDKKYSIGLDIGTNSVGWAVITDEYKVPSKKFKVLGNTDRHSIKKNLIGALLFDSGETAEATRLKRTARRRYTRRKNRICYLQEIFSNEMAKVDDSFFHRLEESFLVEEDKKHERHPIFGNIVDEVAYHEKYPTIYHLRKKLVDSTDKADLRLIYLALAHMIKFRGHFLIEGDLNPDNSDVDKLFIQLVQTYNQLFEENPINASGVDAKAILSARLSKSRRLENLIAQLPGEKKNGLFGNLIALSLGLTPNFKSNFDLAEDAKLQLSKDTYDDDLDNLLAQIGDQYADLFLAAKNLSDAILLSDILRVNTEITKAPLSASMIKRYDEHHQDLTLLKALVRQQLPEKYKEIFFDQSKNGYAGYIDGGASQEEFYKFIKPILEKMDGTEELLVKLNREDLLRKQRTFDNGSIPHQIHLGELHAILRRQEDFYPFLKDNREKIEKILTFRIPYYVGPLARGNSRFAWMTRKSEETITPWNFEEVVDKGASAQSFIERMTNFDKNLPNEKVLPKHSLLYEYFTVYNELTKVKYVTEGMRKPAFLSGEQKKAIVDLLFKTNRKVTVKQLKEDYFKKIECFDSVEISGVEDRFNASLGTYHDLLKIIKDKDFLDNEENEDILEDIVLTLTLFEDREMIEERLKTYAHLFDDKVMKQLKRRRYTGWGRLSRKLINGIRDKQSGKTILDFLKSDGFANRNFMQLIHDDSLTFKEDIQKAQVSGQGDSLHEHIANLAGSPAIKKGILQTVKVVDELVKVMGRHKPENIVIEMARENQTTQKGQKNSRERMKRIEEGIKELGSQILKEHPVENTQLQNEKLYLYYLQNGRDMYVDQELDINRLSDYDVDHIVPQSFLKDDSIDNKVLTRSDKARGKSDNVPSEEVVKKMKNYWRQLLNAKLITQRKFDNLTKAERGGLSELDKAGFIKRQLVETRQITKHVAQILDSRMNTKYDENDKLIREVKVITLKSKLVSDFRKDFQFYKVREINNYHHAHDAYLNAVVGTALIKKYPKLESEFVYGDYKVYDVRKMIAKSEQEIGKATAKYFFYSNIMNFFKTEITLANGEIRKRPLIETNGETGEIVWDKGRDFATVRKVLSMPQVNIVKKTEVQTGGFSKESILPKRNSDKLIARKKDWDPKKYGGFDSPTVAYSVLVVAKVEKGKSKKLKSVKELLGITIMERSSFEKNPIDFLEAKGYKEVKKDLIIKLPKYSLFELENGRKRMLASAGELQKGNELALPSKYVNFLYLASHYEKLKGSPEDNEQKQLFVEQHKHYLDEIIEQISEFSKRVILADANLDKVLSAYNKHRDKPIREQAENIIHLFTLTNLGAPAAFKYFDTTIDRKRYTSTKEVLDATLIHQSITGLYETRIDLSQLGGDGGGSSEAAAKPAPGGTLNLEDEYRLYETSAEPEVSPGSTWLSDFPQAWAETGGMGLAVRQAPLIIPLKATSTPVSIKQYPMSQEAKLGIKPHIQRLLDQGILVPCQSPWNTPLLPVKKPGTNDYRPVQDLREVNKRVEDIHPTVPNPYNLLSGLPPSHRWYTVLDLKDAFFCLRLHPTSQPLFAFEWRDPGMGISGQLTWTRLPQGFKNSPTLFNEALHRDLADFRIQHPDLILLQYVDDILLAATSELDCQQGTRALLLTLGNLGYRASAKKAQLCQKQVKYLGYLLKEGQRWLTEARKETVMGQPTPKTPRQLREFLGKAGFCRLFIPGFAEMAAPLYPLTKPGTLFNWGPDQQKAYQEIKQALLTAPALGLPDLTKPFELFVDEKQGYAKGVLTQKLGPWRRPVAYLSKKLDPVAAGWPPCLRMVAAIAVLRKDAGKLTMGQPLVILAPHAVEALVKQPPDRWLSNARMTHYQAMLLDTDRVQFGPVVALNPATLLPLPEEGAPHDCLEILAETHGTRPDLTDQPIPDADHTWYTDGSSFLQEGQRKAGAAVTTETEVIWARALPAGTSAQRAELIALTQALKMAEGKRLNVYTDSRYAFATAHIHGEIYRRRGWLTSEGREIKNKSEILALLKALFLPKRLSIIHCLGHQKGDSAEARGNRLADQAAREAAIKTPPDTSTLLAGKRTADGSEFEKRTADGSEFESPKKKAKVE

SEQ ID NO: 7579 - protein, 2096 aa, synthetic construct
MPAAKRVKLDGGDKKYSIGLDIGTNSVGWAVITDEYKVPSKKFKVLGNTDRHSIKKNLIGALLFDSGETAEATRLKRTARRRYTRRKNRICYLQEIFSNEMAKVDDSFFHRLEESFLVEEDKKHERHPIFGNIVDEVAYHEKYPTIYHLRKKLVDSTDKADLRLIYLALAHMIKFRGHFLIEGDLNPDNSDVDKLFIQLVQTYNQLFEENPINASGVDAKAILSARLSKSRRLENLIAQLPGEKKNGLFGNLIALSLGLTPNFKSNFDLAEDAKLQLSKDTYDDDLDNLLAQIGDQYADLFLAAKNLSDAILLSDILRVNTEITKAPLSASMIKRYDEHHQDLTLLKALVRQQLPEKYKEIFFDQSKNGYAGYIDGGASQEEFYKFIKPILEKMDGTEELLVKLNREDLLRKQRTFDNGSIPHQIHLGELHAILRRQEDFYPFLKDNREKIEKILTFRIPYYVGPLARGNSRFAWMTRKSEETITPWNFEEVVDKGASAQSFIERMTNFDKNLPNEKVLPKHSLLYEYFTVYNELTKVKYVTEGMRKPAFLSGEQKKAIVDLLFKTNRKVTVKQLKEDYFKKIECFDSVEISGVEDRFNASLGTYHDLLKIIKDKDFLDNEENEDILEDIVLTLTLFEDREMIEERLKTYAHLFDDKVMKQLKRRRYTGWGRLSRKLINGIRDKQSGKTILDFLKSDGFANRNFMQLIHDDSLTFKEDIQKAQVSGQGDSLHEHIANLAGSPAIKKGILQTVKVVDELVKVMGRHKPENIVIEMARENQTTQKGQKNSRERMKRIEEGIKELGSQILKEHPVENTQLQNEKLYLYYLQNGRDMYVDQELDINRLSDYDVDHIVPQSFLKDDSIDNKVLTRSDKARGKSDNVPSEEVVKKMKNYWRQLLNAKLITQRKFDNLTKAERGGLSELDKAGFIKRQLVETRQITKHVAQILDSRMNTKYDENDKLIREVKVITLKSKLVSDFRKDFQFYKVREINNYHHAHDAYLNAVVGTALIKKYPKLESEFVYGDYKVYDVRKMIAKSEQEIGKATAKYFFYSNIMNFFKTEITLANGEIRKRPLIETNGETGEIVWDKGRDFATVRKVLSMPQVNIVKKTEVQTGGFSKESILPKRNSDKLIARKKDWDPKKYGGFDSPTVAYSVLVVAKVEKGKSKKLKSVKELLGITIMERSSFEKNPIDFLEAKGYKEVKKDLIIKLPKYSLFELENGRKRMLASAGELQKGNELALPSKYVNFLYLASHYEKLKGSPEDNEQKQLFVEQHKHYLDEIIEQISEFSKRVILADANLDKVLSAYNKHRDKPIREQAENIIHLFTLTNLGAPAAFKYFDTTIDRKRYTSTKEVLDATLIHQSITGLYETRIDLSQLGGDGGGSSEAAAKPAPGGTLGIEDEYRLHETSTEPDVSLGSTWLSDFPQAWAETGGMGLAVRQAPLIIPLKATSTPVSIQQYPMSHEARLGIKPHIQRLLDQGILVPCQSPWNTPLLPVKKPGTNDYRPVQDLREVNKRVEDIHPTVPNPYNLLSGLPPSHQWYTVLDLKDAFFCLRLHPTSQPLFAFEWRDPGMGISGQLTWTRLPQGFKNSPTLFDEALHRDLADFRIQHPDLILLQYVDDILLAATSELDCQQGTRALLQTLGDLGYRASAKKAQICQKQVKYLGYLLREGQRWLTEARKETVMGQPVPKTPRQLREFLGTAGFCRLWIPGFAEMAAPLYPLTKTGTLFSWGPDQQKAYQEIKQALLTAPALGLPDLTKPFELFVDEKQGYAKGVLTQKLGPWRRPVAYLSKKLDPVAAGWPPCLRMVAAIAVLTKDAGKLTMGQPLVILAPHAVEALVKQPPDRWLSNARMTHYQAMLLDTDRVQFGPVVALNPATLLPLPEEGAPHDCLEILAETHGTRPDLTDQPIPDADHTWYTDGSSFLQEGQRKAGAAVTTETEVIWAGALPAGTSAQRAELIALTQALKMAEGKRLNVYTDSRYAFATAHIHGEIYRRRGLLTSEGREIKNKSEILALLKALFLPKRLSIIHCLGHQKGDSAEARGNRLADQAAREAAIKTPPDTSTLLAGKRTADGSEFEKRTADGSEFESPKKKAKVE

SEQ ID NO: 7580 - protein, 2096 aa, synthetic construct
MPAAKRVKLDGGDKKYSIGLDIGTNSVGWAVITDEYKVPSKKFKVLGNTDRHSIKKNLIGALLFDSGETAEATRLKRTARRRYTRRKNRICYLQEIFSNEMAKVDDSFFHRLEESFLVEEDKKHERHPIFGNIVDEVAYHEKYPTIYHLRKKLVDSTDKADLRLIYLALAHMIKFRGHFLIEGDLNPDNSDVDKLFIQLVQTYNQLFEENPINASGVDAKAILSARLSKSRRLENLIAQLPGEKKNGLFGNLIALSLGLTPNFKSNFDLAEDAKLQLSKDTYDDDLDNLLAQIGDQYADLFLAAKNLSDAILLSDILRVNTEITKAPLSASMIKRYDEHHQDLTLLKALVRQQLPEKYKEIFFDQSKNGYAGYIDGGASQEEFYKFIKPILEKMDGTEELLVKLNREDLLRKQRTFDNGSIPHQIHLGELHAILRRQEDFYPFLKDNREKIEKILTFRIPYYVGPLARGNSRFAWMTRKSEETITPWNFEEVVDKGASAQSFIERMTNFDKNLPNEKVLPKHSLLYEYFTVYNELTKVKYVTEGMRKPAFLSGEQKKAIVDLLFKTNRKVTVKQLKEDYFKKIECFDSVEISGVEDRFNASLGTYHDLLKIIKDKDFLDNEENEDILEDIVLTLTLFEDREMIEERLKTYAHLFDDKVMKQLKRRRYTGWGRLSRKLINGIRDKQSGKTILDFLKSDGFANRNFMQLIHDDSLTFKEDIQKAQVSGQGDSLHEHIANLAGSPAIKKGILQTVKVVDELVKVMGRHKPENIVIEMARENQTTQKGQKNSRERMKRIEEGIKELGSQILKEHPVENTQLQNEKLYLYYLQNGRDMYVDQELDINRLSDYDVDHIVPQSFLKDDSIDNKVLTRSDKARGKSDNVPSEEVVKKMKNYWRQLLNAKLITQRKFDNLTKAERGGLSELDKAGFIKRQLVETRQITKHVAQILDSRMNTKYDENDKLIREVKVITLKSKLVSDFRKDFQFYKVREINNYHHAHDAYLNAVVGTALIKKYPKLESEFVYGDYKVYDVRKMIAKSEQEIGKATAKYFFYSNIMNFFKTEITLANGEIRKRPLIETNGETGEIVWDKGRDFATVRKVLSMPQVNIVKKTEVQTGGFSKESILPKRNSDKLIARKKDWDPKKYGGFDSPTVAYSVLVVAKVEKGKSKKLKSVKELLGITIMERSSFEKNPIDFLEAKGYKEVKKDLIIKLPKYSLFELENGRKRMLASAGELQKGNELALPSKYVNFLYLASHYEKLKGSPEDNEQKQLFVEQHKHYLDEIIEQISEFSKRVILADANLDKVLSAYNKHRDKPIREQAENIIHLFTLTNLGAPAAFKYFDTTIDRKRYTSTKEVLDATLIHQSITGLYETRIDLSQLGGDGGGSSEAAAKPAPGGTLNIEDEYRLHETSKEPDVSLGSTWLSDFPQAWAETGGMGLAVRQAPLIIPLKATSTPVSIKQYPMSQEARLGIKPHIQRLLDQGILVPCQSPWNTPLLPVKKPGTNDYRPVQDLREVNKRVEDIHPTVPNPYNLLSGLPPSHQWYTVLDLKDAFFCLRLHPTSQPLFAFEWRDPEMGISGQLTWTRLPQGFKNSPTLFNEALHRDLAGFRIQHPDLILLQYVDDLLLAATSELDCQQGTRALLQTLGDLGYRASAKKAQICQKQVKYLGYLLKEGQRWLTEARKETVMGQPIPKTPRQLREFLGTAGFCRLWIPGFAEMAAPLYPLTKPGTLFNWGPDQQKAFQEIKQALLTAPALGLPDLTKPFELFVDEKQGYAKGVLTQKLGPWRRPVAYLSKKLDPVAAGWPPCLRMVAAIAVLTKDAGKLTMGQPLVILAPHAVEALVKQPPDRWLSNARMTHYQALLLDTDRVQFGPVVALNPATLLPLPEEGLQHDCLDILAEAHGTRSDLMDQPLPDADHTWYTDGSSFLQEGQRKAGAAVTTETEVIWARALPAGTSAQRAELIALTQALKMAEGKKLNVYTDSRYAFATAHIHGEIYRRRGWLTSEGKEIKNKDEILALLKALFLPKRLSIIHCPGHQKGNSAEARGNRMADQAAREVATRETPETSTLLAGKRTADGSEFEKRTADGSEFESPKKKAKVE

SEQ ID NO: 7581 - protein, 2096 aa, synthetic construct
MPAAKRVKLDGGDKKYSIGLDIGTNSVGWAVITDEYKVPSKKFKVLGNTDRHSIKKNLIGALLFDSGETAEATRLKRTARRRYTRRKNRICYLQEIFSNEMAKVDDSFFHRLEESFLVEEDKKHERHPIFGNIVDEVAYHEKYPTIYHLRKKLVDSTDKADLRLIYLALAHMIKFRGHFLIEGDLNPDNSDVDKLFIQLVQTYNQLFEENPINASGVDAKAILSARLSKSRRLENLIAQLPGEKKNGLFGNLIALSLGLTPNFKSNFDLAEDAKLQLSKDTYDDDLDNLLAQIGDQYADLFLAAKNLSDAILLSDILRVNTEITKAPLSASMIKRYDEHHQDLTLLKALVRQQLPEKYKEIFFDQSKNGYAGYIDGGASQEEFYKFIKPILEKMDGTEELLVKLNREDLLRKQRTFDNGSIPHQIHLGELHAILRRQEDFYPFLKDNREKIEKILTFRIPYYVGPLARGNSRFAWMTRKSEETITPWNFEEVVDKGASAQSFIERMTNFDKNLPNEKVLPKHSLLYEYFTVYNELTKVKYVTEGMRKPAFLSGEQKKAIVDLLFKTNRKVTVKQLKEDYFKKIECFDSVEISGVEDRFNASLGTYHDLLKIIKDKDFLDNEENEDILEDIVLTLTLFEDREMIEERLKTYAHLFDDKVMKQLKRRRYTGWGRLSRKLINGIRDKQSGKTILDFLKSDGFANRNFMQLIHDDSLTFKEDIQKAQVSGQGDSLHEHIANLAGSPAIKKGILQTVKVVDELVKVMGRHKPENIVIEMARENQTTQKGQKNSRERMKRIEEGIKELGSQILKEHPVENTQLQNEKLYLYYLQNGRDMYVDQELDINRLSDYDVDHIVPQSFLKDDSIDNKVLTRSDKARGKSDNVPSEEVVKKMKNYWRQLLNAKLITQRKFDNLTKAERGGLSELDKAGFIKRQLVETRQITKHVAQILDSRMNTKYDENDKLIREVKVITLKSKLVSDFRKDFQFYKVREINNYHHAHDAYLNAVVGTALIKKYPKLESEFVYGDYKVYDVRKMIAKSEQEIGKATAKYFFYSNIMNFFKTEITLANGEIRKRPLIETNGETGEIVWDKGRDFATVRKVLSMPQVNIVKKTEVQTGGFSKESILPKRNSDKLIARKKDWDPKKYGGFDSPTVAYSVLVVAKVEKGKSKKLKSVKELLGITIMERSSFEKNPIDFLEAKGYKEVKKDLIIKLPKYSLFELENGRKRMLASAGELQKGNELALPSKYVNFLYLASHYEKLKGSPEDNEQKQLFVEQHKHYLDEIIEQISEFSKRVILADANLDKVLSAYNKHRDKPIREQAENIIHLFTLTNLGAPAAFKYFDTTIDRKRYTSTKEVLDATLIHQSITGLYETRIDLSQLGGDGGGSSEAAAKPAPGGTLNIEDEYRLHEISTEPDVSPGSTWLSDFPQAWAETGGMGLAVRQAPLIIPLKATSTPVSIKQYPMSQEAKLGIKPHIQRLLDQGILVPCQSPWNTPLLPVKKPGTNDYRPVQGLREVNKRVEDIHPTVPNPYNLLSGLPTSHRWYTVLDLKDAFFCLRLHPTSQPLFASEWRDPGMGISGQLTWTRLPQGFKNSPTLFNEALHRGLADFRIQHPDLILLQYVDDLLLAATSELDCQQGTRALLKTLGNLGYRASAKKAQICQKQVKYLGYLLREGQRWLTEARKETVMGQPTPKTPRQLREFLGKAGFCRLFIPRFAEMAAPLYPLTKPGTLFNWGPDQQKAYHEIKQALLTAPALGLPDLTKPFELFVDEKQGYAKGVLTQKLGPWRRPVAYLSKKLDPVAAGWPPCLRMVAAIAVLTKDAGKLTMGQPLVILAPHAVEALVKQPPDRWLSNARMTHYQAMLLDTDRVQFGPVVALNPATLLPLPEEGAPHDCLEILAETHGTEPDLTDQPIPDADHTWYTDGSSFLQEGQRKAGAAVTTETEVIWARALPAGTSAQRAELIALTQALKMAEGKRLNVYTDSRYAFATAHIHGEIYKRRGWLTSEGREIKNKSEILALLKALFLPKRLSIIHCLGHQKGDSAEARGNRLADQAAREAAIKTPPDTSTLLAGKRTADGSEFEKRTADGSEFESPKKKAKVE

SEQ ID NO: 7582 - protein, 2090 aa, synthetic construct
MPAAKRVKLDGGDKKYSIGLDIGTNSVGWAVITDEYKVPSKKFKVLGNTDRHSIKKNLIGALLFDSGETAEATRLKRTARRRYTRRKNRICYLQEIFSNEMAKVDDSFFHRLEESFLVEEDKKHERHPIFGNIVDEVAYHEKYPTIYHLRKKLVDSTDKADLRLIYLALAHMIKFRGHFLIEGDLNPDNSDVDKLFIQLVQTYNQLFEENPINASGVDAKAILSARLSKSRRLENLIAQLPGEKKNGLFGNLIALSLGLTPNFKSNFDLAEDAKLQLSKDTYDDDLDNLLAQIGDQYADLFLAAKNLSDAILLSDILRVNTEITKAPLSASMIKRYDEHHQDLTLLKALVRQQLPEKYKEIFFDQSKNGYAGYIDGGASQEEFYKFIKPILEKMDGTEELLVKLNREDLLRKQRTFDNGSIPHQIHLGELHAILRRQEDFYPFLKDNREKIEKILTFRIPYYVGPLARGNSRFAWMTRKSEETITPWNFEEVVDKGASAQSFIERMTNFDKNLPNEKVLPKHSLLYEYFTVYNELTKVKYVTEGMRKPAFLSGEQKKAIVDLLFKTNRKVTVKQLKEDYFKKIECFDSVEISGVEDRFNASLGTYHDLLKIIKDKDFLDNEENEDILEDIVLTLTLFEDREMIEERLKTYAHLFDDKVMKQLKRRRYTGWGRLSRKLINGIRDKQSGKTILDFLKSDGFANRNFMQLIHDDSLTFKEDIQKAQVSGQGDSLHEHIANLAGSPAIKKGILQTVKVVDELVKVMGRHKPENIVIEMARENQTTQKGQKNSRERMKRIEEGIKELGSQILKEHPVENTQLQNEKLYLYYLQNGRDMYVDQELDINRLSDYDVDHIVPQSFLKDDSIDNKVLTRSDKARGKSDNVPSEEVVKKMKNYWRQLLNAKLITQRKFDNLTKAERGGLSELDKAGFIKRQLVETRQITKHVAQILDSRMNTKYDENDKLIREVKVITLKSKLVSDFRKDFQFYKVREINNYHHAHDAYLNAVVGTALIKKYPKLESEFVYGDYKVYDVRKMIAKSEQEIGKATAKYFFYSNIMNFFKTEITLANGEIRKRPLIETNGETGEIVWDKGRDFATVRKVLSMPQVNIVKKTEVQTGGFSKESILPKRNSDKLIARKKDWDPKKYGGFDSPTVAYSVLVVAKVEKGKSKKLKSVKELLGITIMERSSFEKNPIDFLEAKGYKEVKKDLIIKLPKYSLFELENGRKRMLASAGELQKGNELALPSKYVNFLYLASHYEKLKGSPEDNEQKQLFVEQHKHYLDEIIEQISEFSKRVILADANLDKVLSAYNKHRDKPIREQAENIIHLFTLTNLGAPAAFKYFDTTIDRKRYTSTKEVLDATLIHQSITGLYETRIDLSQLGGDGGGSSEAAAKPAPGGTLQLDDEYRLYSPLVKPDQNIQFWLEQFPQAWAETAGMGLAKQVPPQVIQLKASATPVSVRQYPLSKEAQEGIRPHVQRLIQQGILVPVQSPWNTPLLPVRKPGTNDYRPVQDLREVNKRVQDIHPTVPNPYNLLCALPPQRSWYTVLDLKDAFFCLRLHPTSQPLFAFEWRDPGTGRTGQLTWTRLPQGFKNSPTIFDEALHRDLANFRIQHPQVTLLQYVDDLLLAGATKQDCLEGTKALLLELSDLGYRASAKKAQICRREVTYLGYSLRDGQRWLTEARKKTVVQIPAPTTAKQVREFLGTAGFCRLWIPGFATLAAPLYPLTKEKGEFSWAPEHQKAFDAIKKALLSAPALALPDVTKPFTLYVDERKGVARGVLTQTLGPWRRPVAYLSKKLDPVASGWPVCLKAIAAVAILVKDADKLTLGQNITVIAPHALENIVRQPPDRWMTNARMTHYQSLLLTERVTFAPPAALNPATLLPEETDEPVTHDCHQLLIEETGVRKDLTDIPLTGEVLTWFTDGSSYVVEGKRMAGAAVVDGTRTIWASSLPEGTSAQKAELMALTQALRLAEGKSINIYTDSRYAFATAHVHGAIYKQRGLLTSAGREIKNKEEILSLLEALHLPKRLAIIHCPGHQKAKDPISRGNQMADRVAKQAAQGVNLLAGKRTADGSEFEKRTADGSEFESPKKKAKVE

SEQ ID NO: 7583 - protein, 2176 aa, synthetic construct
MPAAKRVKLDGGDKKYSIGLDIGTNSVGWAVITDEYKVPSKKFKVLGNTDRHSIKKNLIGALLFDSGETAEATRLKRTARRRYTRRKNRICYLQEIFSNEMAKVDDSFFHRLEESFLVEEDKKHERHPIFGNIVDEVAYHEKYPTIYHLRKKLVDSTDKADLRLIYLALAHMIKFRGHFLIEGDLNPDNSDVDKLFIQLVQTYNQLFEENPINASGVDAKAILSARLSKSRRLENLIAQLPGEKKNGLFGNLIALSLGLTPNFKSNFDLAEDAKLQLSKDTYDDDLDNLLAQIGDQYADLFLAAKNLSDAILLSDILRVNTEITKAPLSASMIKRYDEHHQDLTLLKALVRQQLPEKYKEIFFDQSKNGYAGYIDGGASQEEFYKFIKPILEKMDGTEELLVKLNREDLLRKQRTFDNGSIPHQIHLGELHAILRRQEDFYPFLKDNREKIEKILTFRIPYYVGPLARGNSRFAWMTRKSEETITPWNFEEVVDKGASAQSFIERMTNFDKNLPNEKVLPKHSLLYEYFTVYNELTKVKYVTEGMRKPAFLSGEQKKAIVDLLFKTNRKVTVKQLKEDYFKKIECFDSVEISGVEDRFNASLGTYHDLLKIIKDKDFLDNEENEDILEDIVLTLTLFEDREMIEERLKTYAHLFDDKVMKQLKRRRYTGWGRLSRKLINGIRDKQSGKTILDFLKSDGFANRNFMQLIHDDSLTFKEDIQKAQVSGQGDSLHEHIANLAGSPAIKKGILQTVKVVDELVKVMGRHKPENIVIEMARENQTTQKGQKNSRERMKRIEEGIKELGSQILKEHPVENTQLQNEKLYLYYLQNGRDMYVDQELDINRLSDYDVDHIVPQSFLKDDSIDNKVLTRSDKARGKSDNVPSEEVVKKMKNYWRQLLNAKLITQRKFDNLTKAERGGLSELDKAGFIKRQLVETRQITKHVAQILDSRMNTKYDENDKLIREVKVITLKSKLVSDFRKDFQFYKVREINNYHHAHDAYLNAVVGTALIKKYPKLESEFVYGDYKVYDVRKMIAKSEQEIGKATAKYFFYSNIMNFFKTEITLANGEIRKRPLIETNGETGEIVWDKGRDFATVRKVLSMPQVNIVKKTEVQTGGFSKESILPKRNSDKLIARKKDWDPKKYGGFDSPTVAYSVLVVAKVEKGKSKKLKSVKELLGITIMERSSFEKNPIDFLEAKGYKEVKKDLIIKLPKYSLFELENGRKRMLASAGELQKGNELALPSKYVNFLYLASHYEKLKGSPEDNEQKQLFVEQHKHYLDEIIEQISEFSKRVILADANLDKVLSAYNKHRDKPIREQAENIIHLFTLTNLGAPAAFKYFDTTIDRKRYTSTKEVLDATLIHQSITGLYETRIDLSQLGGDGGGSSEAAAKPAPGGMDPLQLLQPLEAEIKGTKLKAHWNSGATITCVPQAFLEEEVPIKNIWIKTIHGEKEQPVYYLTFKIQGRKVEAEVISSPYDYILVSPSDIPWLMKKPLQLTTLVPLQEYEERLLKQTMLTGSYKEKLQSLFLKYDALWQHWENQVGHRRIKPHHIATGTVNPRPQKQYPINPKAKASIQTVINDLLKQGVLIQQNSIMNTPVYPVPKPDGKWRMVLDYREVNKTIPLIAAQNQHSAGILSSIFRGKYKTTLDLSNGFWAHSITPESYWLTAFTWLGQQYCWTRLPQGFLNSPALFNADVVDLLKEVPNVQVYVDDIYISHDDPREHLEQLEKVFSLLLNAGYVVSLKKSEIAQHEVEFLGFNITKEGRGLTETFKQKLLNITPPRDLKQLQSILGKLNFARNFIPNFSELVKPLYNIIATAPGKYITWTTDNSQQLQNIISMLNSAENLEERNPEVRLIMKVNTSPSAGYIRFYNEFAKRPIMYLNYVYTKAEVKFTNTEKLLTTIHKGLIKALDLGMGQEILVYSPIVSMTKIQKTPLPERKALPIRWITWMSYLEDPRIQFHYDKTLPELQQVPTVTDDIIAKIKHPSEFSMVFYTDGSAIKHPNVNKSHNAGMGIAQVQFKPEFTVINTWSIPLGDHTAQLAEVAAVEFACKKALKIDGPVLIVTDSFYVAESVNKELPYWQSNGFFNNKKKPLKHVSKWKSIADCIQLKPDIIIIHEKGHQPTASTFHTEGNNLADKLATQGSYVVNAGKRTADGSEFEKRTADGSEFESPKKKAKVE

SEQ ID NO: 7584 - protein, 2094 aa, synthetic construct
MPAAKRVKLDGGDKKYSIGLDIGTNSVGWAVITDEYKVPSKKFKVLGNTDRHSIKKNLIGALLFDSGETAEATRLKRTARRRYTRRKNRICYLQEIFSNEMAKVDDSFFHRLEESFLVEEDKKHERHPIFGNIVDEVAYHEKYPTIYHLRKKLVDSTDKADLRLIYLALAHMIKFRGHFLIEGDLNPDNSDVDKLFIQLVQTYNQLFEENPINASGVDAKAILSARLSKSRRLENLIAQLPGEKKNGLFGNLIALSLGLTPNFKSNFDLAEDAKLQLSKDTYDDDLDNLLAQIGDQYADLFLAAKNLSDAILLSDILRVNTEITKAPLSASMIKRYDEHHQDLTLLKALVRQQLPEKYKEIFFDQSKNGYAGYIDGGASQEEFYKFIKPILEKMDGTEELLVKLNREDLLRKQRTFDNGSIPHQIHLGELHAILRRQEDFYPFLKDNREKIEKILTFRIPYYVGPLARGNSRFAWMTRKSEETITPWNFEEVVDKGASAQSFIERMTNFDKNLPNEKVLPKHSLLYEYFTVYNELTKVKYVTEGMRKPAFLSGEQKKAIVDLLFKTNRKVTVKQLKEDYFKKIECFDSVEISGVEDRFNASLGTYHDLLKIIKDKDFLDNEENEDILEDIVLTLTLFEDREMIEERLKTYAHLFDDKVMKQLKRRRYTGWGRLSRKLINGIRDKQSGKTILDFLKSDGFANRNFMQLIHDDSLTFKEDIQKAQVSGQGDSLHEHIANLAGSPAIKKGILQTVKVVDELVKVMGRHKPENIVIEMARENQTTQKGQKNSRERMKRIEEGIKELGSQILKEHPVENTQLQNEKLYLYYLQNGRDMYVDQELDINRLSDYDVDHIVPQSFLKDDSIDNKVLTRSDKARGKSDNVPSEEVVKKMKNYWRQLLNAKLITQRKFDNLTKAERGGLSELDKAGFIKRQLVETRQITKHVAQILDSRMNTKYDENDKLIREVKVITLKSKLVSDFRKDFQFYKVREINNYHHAHDAYLNAVVGTALIKKYPKLESEFVYGDYKVYDVRKMIAKSEQEIGKATAKYFFYSNIMNFFKTEITLANGEIRKRPLIETNGETGEIVWDKGRDFATVRKVLSMPQVNIVKKTEVQTGGFSKESILPKRNSDKLIARKKDWDPKKYGGFDSPTVAYSVLVVAKVEKGKSKKLKSVKELLGITIMERSSFEKNPIDFLEAKGYKEVKKDLIIKLPKYSLFELENGRKRMLASAGELQKGNELALPSKYVNFLYLASHYEKLKGSPEDNEQKQLFVEQHKHYLDEIIEQISEFSKRVILADANLDKVLSAYNKHRDKPIREQAENIIHLFTLTNLGAPAAFKYFDTTIDRKRYTSTKEVLDATLIHQSITGLYETRIDLSQLGGDGGGSSEAAAKPAPGGVLNLEEEYRLHEKPVPSSIDPSWLQLFPTVWAERAGMGLANQVPPVVVELRSGASPVAVRQYPMSKEAREGIRPHIQRFLDLGVLVPCQSPWNTPLLPVKKPGTNDYRPVQDLREINKRVQDIHPTVPNPYNLLSSLPPSHTWYSVLDLKDAFFCLKLHPNSQPLFAFEWRDPEKGNTGQLTWTRLPQGFKNSPTLFDEALHRDLAPFRALNPQVVLLQYVDDLLVAAPTYRDCKEGTQKLLQELSKLGYRVSAKKAQLCQKEVTYLGYLLKEGKRWLTPARKATVMKIPPPTTPRQVREFLGTAGFCRLWIPGFASLAAPLYPLTKESIPFIWTEEHQKAFDRIKEALLSAPALALPDLTKPFTLYVDERAGVARGVLTQTLGPWRRPVAYLSKKLDPVASGWPTCLKAVAAVALLLKDADKLTLGQNVTVIASHSLESIVRQPPDRWMTNARMTHYQSLLLNERVSFAPPAVLNPATLLPVESEATPVHRCSEILAEETGTRRDLKDQPLPGVPAWYTDGSSFIAEGKRRAGAAIVDGKRTVWASSLPEGTSAQKAELVALTQALRLAEGKDINIYTDSRYAFATAHIHGAIYKQRGLLTSAGKDIKNKEEILALLEAIHLPKRVAIIHCPGHQKGNDPVATGNRRADEAAKQAALSTRVLAETTKPAGKRTADGSEFEKRTADGSEFESPKKKAKVE

SEQ ID NO: 7585 - protein, 2094 aa, synthetic construct
MPAAKRVKLDGGDKKYSIGLDIGTNSVGWAVITDEYKVPSKKFKVLGNTDRHSIKKNLIGALLFDSGETAEATRLKRTARRRYTRRKNRICYLQEIFSNEMAKVDDSFFHRLEESFLVEEDKKHERHPIFGNIVDEVAYHEKYPTIYHLRKKLVDSTDKADLRLIYLALAHMIKFRGHFLIEGDLNPDNSDVDKLFIQLVQTYNQLFEENPINASGVDAKAILSARLSKSRRLENLIAQLPGEKKNGLFGNLIALSLGLTPNFKSNFDLAEDAKLQLSKDTYDDDLDNLLAQIGDQYADLFLAAKNLSDAILLSDILRVNTEITKAPLSASMIKRYDEHHQDLTLLKALVRQQLPEKYKEIFFDQSKNGYAGYIDGGASQEEFYKFIKPILEKMDGTEELLVKLNREDLLRKQRTFDNGSIPHQIHLGELHAILRRQEDFYPFLKDNREKIEKILTFRIPYYVGPLARGNSRFAWMTRKSEETITPWNFEEVVDKGASAQSFIERMTNFDKNLPNEKVLPKHSLLYEYFTVYNELTKVKYVTEGMRKPAFLSGEQKKAIVDLLFKTNRKVTVKQLKEDYFKKIECFDSVEISGVEDRFNASLGTYHDLLKIIKDKDFLDNEENEDILEDIVLTLTLFEDREMIEERLKTYAHLFDDKVMKQLKRRRYTGWGRLSRKLINGIRDKQSGKTILDFLKSDGFANRNFMQLIHDDSLTFKEDIQKAQVSGQGDSLHEHIANLAGSPAIKKGILQTVKVVDELVKVMGRHKPENIVIEMARENQTTQKGQKNSRERMKRIEEGIKELGSQILKEHPVENTQLQNEKLYLYYLQNGRDMYVDQELDINRLSDYDVDHIVPQSFLKDDSIDNKVLTRSDKARGKSDNVPSEEVVKKMKNYWRQLLNAKLITQRKFDNLTKAERGGLSELDKAGFIKRQLVETRQITKHVAQILDSRMNTKYDENDKLIREVKVITLKSKLVSDFRKDFQFYKVREINNYHHAHDAYLNAVVGTALIKKYPKLESEFVYGDYKVYDVRKMIAKSEQEIGKATAKYFFYSNIMNFFKTEITLANGEIRKRPLIETNGETGEIVWDKGRDFATVRKVLSMPQVNIVKKTEVQTGGFSKESILPKRNSDKLIARKKDWDPKKYGGFDSPTVAYSVLVVAKVEKGKSKKLKSVKELLGITIMERSSFEKNPIDFLEAKGYKEVKKDLIIKLPKYSLFELENGRKRMLASAGELQKGNELALPSKYVNFLYLASHYEKLKGSPEDNEQKQLFVEQHKHYLDEIIEQISEFSKRVILADANLDKVLSAYNKHRDKPIREQAENIIHLFTLTNLGAPAAFKYFDTTIDRKRYTSTKEVLDATLIHQSITGLYETRIDLSQLGGDGGGSSEAAAKPAPGGVLNLEEEYRLHEKPVPSSIDPSWLQLFPTVWAERAGMGLANQVPPVVVELRSGASPVAVRQYPMSKEAREGIRPHIQRFLDLGVLVPCQSPWNTPLLPVKKPGTNDYRPVQDLREINKRVQDIHPTVPNPYNLLSSLPPSHTWYSVLDLKDAFFCLKLHPNSQPLFAFEWRDPEKGNTGQLTWTRLPQGFKNSPTLFNEALHRDLAPFRALNPQVVLLQYVDDLLVAAPTYRDCKEGTQKLLQELSKLGYRVSAKKAQLCQKEVTYLGYLLKEGKRWLTPARKATVMKIPPPTTPRQVREFLGTAGFCRLWIPGFASLAAPLYPLTKPSIPFIWTEEHQKAFDRIKEALLSAPALALPDLTKPFTLYVDERAGVARGVLTQTLGPWRRPVAYLSKKLDPVASGWPTCLKAVAAVALLLKDADKLTLGQNVTVIASHSLESIVRQPPDRWMTNARMTHYQSLLLNERVSFAPPAVLNPATLLPVESEATPVHRCSEILAEETGTRRDLKDQPLPGVPAWYTDGSSFIAEGKRRAGAAIVDGKRTVWASSLPEGTSAQKAELVALTQALRLAEGKDINIYTDSRYAFATAHIHGAIYKQRGWLTSAGKDIKNKEEILALLEAIHLPKRVAIIHCPGHQKGNDPVATGNRRADEAAKQAALSTRVLAETTKPAGKRTADGSEFEKRTADGSEFESPKKKAKVE

SEQ ID NO: 7586 - protein, 2094 aa, synthetic construct
MPAAKRVKLDGGDKKYSIGLDIGTNSVGWAVITDEYKVPSKKFKVLGNTDRHSIKKNLIGALLFDSGETAEATRLKRTARRRYTRRKNRICYLQEIFSNEMAKVDDSFFHRLEESFLVEEDKKHERHPIFGNIVDEVAYHEKYPTIYHLRKKLVDSTDKADLRLIYLALAHMIKFRGHFLIEGDLNPDNSDVDKLFIQLVQTYNQLFEENPINASGVDAKAILSARLSKSRRLENLIAQLPGEKKNGLFGNLIALSLGLTPNFKSNFDLAEDAKLQLSKDTYDDDLDNLLAQIGDQYADLFLAAKNLSDAILLSDILRVNTEITKAPLSASMIKRYDEHHQDLTLLKALVRQQLPEKYKEIFFDQSKNGYAGYIDGGASQEEFYKFIKPILEKMDGTEELLVKLNREDLLRKQRTFDNGSIPHQIHLGELHAILRRQEDFYPFLKDNREKIEKILTFRIPYYVGPLARGNSRFAWMTRKSEETITPWNFEEVVDKGASAQSFIERMTNFDKNLPNEKVLPKHSLLYEYFTVYNELTKVKYVTEGMRKPAFLSGEQKKAIVDLLFKTNRKVTVKQLKEDYFKKIECFDSVEISGVEDRFNASLGTYHDLLKIIKDKDFLDNEENEDILEDIVLTLTLFEDREMIEERLKTYAHLFDDKVMKQLKRRRYTGWGRLSRKLINGIRDKQSGKTILDFLKSDGFANRNFMQLIHDDSLTFKEDIQKAQVSGQGDSLHEHIANLAGSPAIKKGILQTVKVVDELVKVMGRHKPENIVIEMARENQTTQKGQKNSRERMKRIEEGIKELGSQILKEHPVENTQLQNEKLYLYYLQNGRDMYVDQELDINRLSDYDVDHIVPQSFLKDDSIDNKVLTRSDKARGKSDNVPSEEVVKKMKNYWRQLLNAKLITQRKFDNLTKAERGGLSELDKAGFIKRQLVETRQITKHVAQILDSRMNTKYDENDKLIREVKVITLKSKLVSDFRKDFQFYKVREINNYHHAHDAYLNAVVGTALIKKYPKLESEFVYGDYKVYDVRKMIAKSEQEIGKATAKYFFYSNIMNFFKTEITLANGEIRKRPLIETNGETGEIVWDKGRDFATVRKVLSMPQVNIVKKTEVQTGGFSKESILPKRNSDKLIARKKDWDPKKYGGFDSPTVAYSVLVVAKVEKGKSKKLKSVKELLGITIMERSSFEKNPIDFLEAKGYKEVKKDLIIKLPKYSLFELENGRKRMLASAGELQKGNELALPSKYVNFLYLASHYEKLKGSPEDNEQKQLFVEQHKHYLDEIIEQISEFSKRVILADANLDKVLSAYNKHRDKPIREQAENIIHLFTLTNLGAPAAFKYFDTTIDRKRYTSTKEVLDATLIHQSITGLYETRIDLSQLGGDGGGSSEAAAKPAPGGVLNLEEEYRLHEKPVPSSIDPSWLQLFPTVWAERAGMGLANQVPPVVVELRSGASPVAVRQYPMSKEAREGIRPHIQRFLDLGVLVPCQSPWNTPLLPVKKPGTNDYRPVQDLREINKRVQDIHPTVPNPYNLLSSLPPSHTWYSVLDLKDAFFCLKLHPNSQPLFAFEWRDPEKGNTGQLTWTRLPQGFKNSPTLFNEALHRDLAPFRALNPQVVLLQYVDDLLVAAPTYRDCKEGTQKLLQELSKLGYRVSAKKAQLCQKEVTYLGYLLKEGKRWLTPARKATVMKIPPPTTPRQVREFLGKAGFCRLFIPGFASLAAPLYPLTKPSIPFIWTEEHQKAFDRIKEALLSAPALALPDLTKPFTLYVDERAGVARGVLTQTLGPWRRPVAYLSKKLDPVASGWPTCLKAVAAVALLLKDADKLTLGQNVTVIASHSLESIVRQPPDRWMTNARMTHYQSLLLNERVSFAPPAVLNPATLLPVESEATPVHRCSEILAEETGTRRDLKDQPLPGVPAWYTDGSSFIAEGKRRAGAAIVDGKRTVWASSLPEGTSAQKAELVALTQALRLAEGKDINIYTDSRYAFATAHIHGAIYKQRGWLTSAGKDIKNKEEILALLEAIHLPKRVAIIHCPGHQKGNDPVATGNRRADEAAKQAALSTRVLAETTKPAGKRTADGSEFEKRTADGSEFESPKKKAKVE

SEQ ID NO: 7587 - protein, 2096 aa, synthetic construct; identical to SEQ ID NO: 4538

SEQ ID NO: 7588 - protein, 2098 aa, synthetic construct; identical to SEQ ID NO: 4539

SEQ ID NO: 7589 - protein, 2173 aa, synthetic construct
MPAAKRVKLDGGDKKYSIGLDIGTNSVGWAVITDEYKVPSKKFKVLGNTDRHSIKKNLIGALLFDSGETAEATRLKRTARRRYTRRKNRICYLQEIFSNEMAKVDDSFFHRLEESFLVEEDKKHERHPIFGNIVDEVAYHEKYPTIYHLRKKLVDSTDKADLRLIYLALAHMIKFRGHFLIEGDLNPDNSDVDKLFIQLVQTYNQLFEENPINASGVDAKAILSARLSKSRRLENLIAQLPGEKKNGLFGNLIALSLGLTPNFKSNFDLAEDAKLQLSKDTYDDDLDNLLAQIGDQYADLFLAAKNLSDAILLSDILRVNTEITKAPLSASMIKRYDEHHQDLTLLKALVRQQLPEKYKEIFFDQSKNGYAGYIDGGASQEEFYKFIKPILEKMDGTEELLVKLNREDLLRKQRTFDNGSIPHQIHLGELHAILRRQEDFYPFLKDNREKIEKILTFRIPYYVGPLARGNSRFAWMTRKSEETITPWNFEEVVDKGASAQSFIERMTNFDKNLPNEKVLPKHSLLYEYFTVYNELTKVKYVTEGMRKPAFLSGEQKKAIVDLLFKTNRKVTVKQLKEDYFKKIECFDSVEISGVEDRFNASLGTYHDLLKIIKDKDFLDNEENEDILEDIVLTLTLFEDREMIEERLKTYAHLFDDKVMKQLKRRRYTGWGRLSRKLINGIRDKQSGKTILDFLKSDGFANRNFMQLIHDDSLTFKEDIQKAQVSGQGDSLHEHIANLAGSPAIKKGILQTVKVVDELVKVMGRHKPENIVIEMARENQTTQKGQKNSRERMKRIEEGIKELGSQILKEHPVENTQLQNEKLYLYYLQNGRDMYVDQELDINRLSDYDVDHIVPQSFLKDDSIDNKVLTRSDKARGKSDNVPSEEVVKKMKNYWRQLLNAKLITQRKFDNLTKAERGGLSELDKAGFIKRQLVETRQITKHVAQILDSRMNTKYDENDKLIREVKVITLKSKLVSDFRKDFQFYKVREINNYHHAHDAYLNAVVGTALIKKYPKLESEFVYGDYKVYDVRKMIAKSEQEIGKATAKYFFYSNIMNFFKTEITLANGEIRKRPLIETNGETGEIVWDKGRDFATVRKVLSMPQVNIVKKTEVQTGGFSKESILPKRNSDKLIARKKDWDPKKYGGFDSPTVAYSVLVVAKVEKGKSKKLKSVKELLGITIMERSSFEKNPIDFLEAKGYKEVKKDLIIKLPKYSLFELENGRKRMLASAGELQKGNELALPSKYVNFLYLASHYEKLKGSPEDNEQKQLFVEQHKHYLDEIIEQISEFSKRVILADANLDKVLSAYNKHRDKPIREQAENIIHLFTLTNLGAPAAFKYFDTTIDRKRYTSTKEVLDATLIHQSITGLYETRIDLSQLGGDGGGSSPAPEAAAKGGMDLLKPLTVERKGVKIKGYWNSQADITCVPKDLLQGEEPVRQQNVTTIHGTQEGDVYYVNLKIDGRRINTEVIGTTLDYAIITPGDVPWILKKPLELTIKLDLEEQQGTLLNNSILSKKGKEELKQLFEKYSALWQSWENQVGHRRIRPHKIATGTVKPTPQKQYHINPKAKPDIQIVINDLLKQGVLIQKESTMNTPVYPVPKPNGRWRMVLDYRAVNKVTPLIAVQNQHSYGILGSLFKGRYKTTIDLSNGFWAHPIVPEDYWITAFTWQGKQYCWTVLPQGFLNSPGLFTGDVVDLLQGIPNVEVYVDDVYISHDSEKEHLEYLDILFNRLKEAGYIISLKKSNIANSIVDFLGFQITNEGRGLTDTFKEKLENITAPTTLKQLQSILGLLNFARNFIPDFTELIAPLYALIPKSTKNYVPWQIEHSTTLETLITKLNGAEYLQGRKGDKTLIMKVNASYTTGYIRYYNEGEKKPISYVSIVFSKTELKFTELEKLLTTVHKGLLKALDLSMGQNIHVYSPIVSMQNIQKTPQTAKKALASRWLSWLSYLEDPRIRFFYDPQMPALKDLPAVDTGKDNKKHPSNFQHIFYTDGSAITSPTKEGHLNAGMGIVYFINKDGNLQKQQEWSISLGNHTAQFAEIAAFEFALKKCLPLGGNILVVTDSNYVAKAYNEELDVWASNGFVNNRKKPLKHISKWKSVADLKRLRPDVVVTHEPGHQKLDSSPHAYGNNLADQLATQASFKVHAGKRTADGSEFEKRTADGSEFESPKKKAKVE

SEQ ID NO: 7590 - protein, 2127 aa, synthetic construct
MPAAKRVKLDGGDKKYSIGLDIGTNSVGWAVITDEYKVPSKKFKVLGNTDRHSIKKNLIGALLFDSGETAEATRLKRTARRRYTRRKNRICYLQEIFSNEMAKVDDSFFHRLEESFLVEEDKKHERHPIFGNIVDEVAYHEKYPTIYHLRKKLVDSTDKADLRLIYLALAHMIKFRGHFLIEGDLNPDNSDVDKLFIQLVQTYNQLFEENPINASGVDAKAILSARLSKSRRLENLIAQLPGEKKNGLFGNLIALSLGLTPNFKSNFDLAEDAKLQLSKDTYDDDLDNLLAQIGDQYADLFLAAKNLSDAILLSDILRVNTEITKAPLSASMIKRYDEHHQDLTLLKALVRQQLPEKYKEIFFDQSKNGYAGYIDGGASQEEFYKFIKPILEKMDGTEELLVKLNREDLLRKQRTFDNGSIPHQIHLGELHAILRRQEDFYPFLKDNREKIEKILTFRIPYYVGPLARGNSRFAWMTRKSEETITPWNFEEVVDKGASAQSFIERMTNFDKNLPNEKVLPKHSLLYEYFTVYNELTKVKYVTEGMRKPAFLSGEQKKAIVDLLFKTNRKVTVKQLKEDYFKKIECFDSVEISGVEDRFNASLGTYHDLLKIIKDKDFLDNEENEDILEDIVLTLTLFEDREMIEERLKTYAHLFDDKVMKQLKRRRYTGWGRLSRKLINGIRDKQSGKTILDFLKSDGFANRNFMQLIHDDSLTFKEDIQKAQVSGQGDSLHEHIANLAGSPAIKKGILQTVKVVDELVKVMGRHKPENIVIEMARENQTTQKGQKNSRERMKRIEEGIKELGSQILKEHPVENTQLQNEKLYLYYLQNGRDMYVDQELDINRLSDYDVDHIVPQSFLKDDSIDNKVLTRSDKARGKSDNVPSEEVVKKMKNYWRQLLNAKLITQRKFDNLTKAERGGLSELDKAGFIKRQLVETRQITKHVAQILDSRMNTKYDENDKLIREVKVITLKSKLVSDFRKDFQFYKVREINNYHHAHDAYLNAVVGTALIKKYPKLESEFVYGDYKVYDVRKMIAKSEQEIGKATAKYFFYSNIMNFFKTEITLANGEIRKRPLIETNGETGEIVWDKGRDFATVRKVLSMPQVNIVKKTEVQTGGFSKESILPKRNSDKLIARKKDWDPKKYGGFDSPTVAYSVLVVAKVEKGKSKKLKSVKELLGITIMERSSFEKNPIDFLEAKGYKEVKKDLIIKLPKYSLFELENGRKRMLASAGELQKGNELALPSKYVNFLYLASHYEKLKGSPEDNEQKQLFVEQHKHYLDEIIEQISEFSKRVILADANLDKVLSAYNKHRDKPIREQAENIIHLFTLTNLGAPAAFKYFDTTIDRKRYTSTKEVLDATLIHQSITGLYETRIDLSQLGGDGGGSSPAPEAAAKGGLLGRDLLTKLKAQIQFSTEGPQVTWEDRPAMCLVLNLEEEYRLHEKPVPPSIDPSWLQLFPMVWAEKAGMGLANQVPPVVVELKSDASPVAVRQYPMSKEAREGIRPHIQRFLDLGILVPCQSPWNTPLLPVKKPGTNDYRPVQDLREVNKRVQDIHPTVPNPYNLLSSLPPSHTWYSVLDLKDAFFCLKLHPNSQPLFAFEWRDPEKGNTGQLTWTRLPQGFKNSPTLFNEALHRDLASFRALNPQVVMLQYVDDLLVAAPTYRDCKEGTRRLLQELSKLGYRVSAKKAQLCREEVTYLGYLLKGGKRWLTPARKATVMKIPTPTTPRQVREFLGTAGFCRLWIPGFASLAAPLYPLTRPKVPFTWTEAHQEAFGRIKEALLSAPALALPDLTKPFALYVDEKEGVARGVLTQTLGPWRRPVAYLSKKLDPVASGWPTCLKAIAAVALLLKDADKLTLGQNVLVIAPHNLESIVRQPPDRWMTNARMTHYQSLLLNERVSFAPPAILNPATLLPVESDDTPIHICSEILAEETGTRPDLRDQPLPGVPAWYTDGSSFIMDGRRQAGAAIVDNKRTVWASNLPEGTSAQKAELIALTQALRLAEGKSINIYTDSRYAFATAHVHGAIYKQRGWLTSAGKDIKNKEEILALLEAIHLPKRVAIIHCPGHQRGTDPVATGNRKADEAAKQAAQSTRILTETTKNAGKRTADGSEFEKRTADGSEFESPKKKAKVE

SEQ ID NO: 7591 - protein, 2218 aa, synthetic construct
MPAAKRVKLDGGDKKYSIGLDIGTNSVGWAVITDEYKVPSKKFKVLGNTDRHSIKKNLIGALLFDSGETAEATRLKRTARRRYTRRKNRICYLQEIFSNEMAKVDDSFFHRLEESFLVEEDKKHERHPIFGNIVDEVAYHEKYPTIYHLRKKLVDSTDKADLRLIYLALAHMIKFRGHFLIEGDLNPDNSDVDKLFIQLVQTYNQLFEENPINASGVDAKAILSARLSKSRRLENLIAQLPGEKKNGLFGNLIALSLGLTPNFKSNFDLAEDAKLQLSKDTYDDDLDNLLAQIGDQYADLFLAAKNLSDAILLSDILRVNTEITKAPLSASMIKRYDEHHQDLTLLKALVRQQLPEKYKEIFFDQSKNGYAGYIDGGASQEEFYKFIKPILEKMDGTEELLVKLNREDLLRKQRTFDNGSIPHQIHLGELHAILRRQEDFYPFLKDNREKIEKILTFRIPYYVGPLARGNSRFAWMTRKSEETITPWNFEEVVDKGASAQSFIERMTNFDKNLPNEKVLPKHSLLYEYFTVYNELTKVKYVTEGMRKPAFLSGEQKKAIVDLLFKTNRKVTVKQLKEDYFKKIECFDSVEISGVEDRFNASLGTYHDLLKIIKDKDFLDNEENEDILEDIVLTLTLFEDREMIEERLKTYAHLFDDKVMKQLKRRRYTGWGRLSRKLINGIRDKQSGKTILDFLKSDGFANRNFMQLIHDDSLTFKEDIQKAQVSGQGDSLHEHIANLAGSPAIKKGILQTVKVVDELVKVMGRHKPENIVIEMARENQTTQKGQKNSRERMKRIEEGIKELGSQILKEHPVENTQLQNEKLYLYYLQNGRDMYVDQELDINRLSDYDVDHIVPQSFLKDDSIDNKVLTRSDKARGKSDNVPSEEVVKKMKNYWRQLLNAKLITQRKFDNLTKAERGGLSELDKAGFIKRQLVETRQITKHVAQILDSRMNTKYDENDKLIREVKVITLKSKLVSDFRKDFQFYKVREINNYHHAHDAYLNAVVGTALIKKYPKLESEFVYGDYKVYDVRKMIAKSEQEIGKATAKYFFYSNIMNFFKTEITLANGEIRKRPLIETNGETGEIVWDKGRDFATVRKVLSMPQVNIVKKTEVQTGGFSKESILPKRNSDKLIARKKDWDPKKYGGFDSPTVAYSVLVVAKVEKGKSKKLKSVKELLGITIMERSSFEKNPIDFLEAKGYKEVKKDLIIKLPKYSLFELENGRKRMLASAGELQKGNELALPSKYVNFLYLASHYEKLKGSPEDNEQKQLFVEQHKHYLDEIIEQISEFSKRVILADANLDKVLSAYNKHRDKPIREQAENIIHLFTLTNLGAPAAFKYFDTTIDRKRYTSTKEVLDATLIHQSITGLYETRIDLSQLGGDGGGSSPAPEAAAKGGTLGDQGSRGSDPLPEPRVTLTVEGIPTEFLVNTGAEHSVLTKPMGKMGSKRTVVAGATGSKVYPWTTKRLLKIGQKQVTHSFLVIPECPAPLLGRDLLTKLKAQIQFSTEGPQVTWEDRPAMCLVLNLEEEYRLHEKPVPPSIDPSWLQLFPMVWAEKAGMGLANQVPPVVVELKSDASPVAVRQYPMSKEAREGIRPHIQRFLDLGILVPCQSPWNTPLLPVKKPGTNDYRPVQDLREVNKRVQDIHPTVPNPYNLLSSLPPSHTWYSVLDLKDAFFCLKLHPNSQPLFAFEWRDPEKGNTGQLTWTRLPQGFKNSPTLFNEALHRDLASFRALNPQVVMLQYVDDLLVAAPTYRDCKEGTRRLLQELSKLGYRVSAKKAQLCREEVTYLGYLLKGGKRWLTPARKATVMKIPTPTTPRQVREFLGTAGFCRLWIPGFASLAAPLYPLTRPKVPFTWTEAHQEAFGRIKEALLSAPALALPDLTKPFALYVDEKEGVARGVLTQTLGPWRRPVAYLSKKLDPVASGWPTCLKAIAAVALLLKDADKLTLGQNVLVIAPHNLESIVRQPPDRWMTNARMTHYQSLLLNERVSFAPPAILNPATLLPVESDDTPIHICSEILAEETGTRPDLRDQPLPGVPAWYTDGSSFIMDGRRQAGAAIVDNKRTVWASNLPEGTSAQKAELIALTQALRLAEGKSINIYTDSRYAFATAHVHGAIYKQRGWLTSAGKDIKNKEEILALLEAIHLPKRVAIIHCPGHQRGTDPVATGNRKADEAAKQAAQSTRILTETTKNAGKRTADGSEFEKRTADGSEFESPKKKAKVE

SEQ ID NO: 7592 - protein, 2096 aa, synthetic construct
MPAAKRVKLDGGDKKYSIGLDIGTNSVGWAVITDEYKVPSKKFKVLGNTDRHSIKKNLIGALLFDSGETAEATRLKRTARRRYTRRKNRICYLQEIFSNEMAKVDDSFFHRLEESFLVEEDKKHERHPIFGNIVDEVAYHEKYPTIYHLRKKLVDSTDKADLRLIYLALAHMIKFRGHFLIEGDLNPDNSDVDKLFIQLVQTYNQLFEENPINASGVDAKAILSARLSKSRRLENLIAQLPGEKKNGLFGNLIALSLGLTPNFKSNFDLAEDAKLQLSKDTYDDDLDNLLAQIGDQYADLFLAAKNLSDAILLSDILRVNTEITKAPLSASMIKRYDEHHQDLTLLKALVRQQLPEKYKEIFFDQSKNGYAGYIDGGASQEEFYKFIKPILEKMDGTEELLVKLNREDLLRKQRTFDNGSIPHQIHLGELHAILRRQEDFYPFLKDNREKIEKILTFRIPYYVGPLARGNSRFAWMTRKSEETITPWNFEEVVDKGASAQSFIERMTNFDKNLPNEKVLPKHSLLYEYFTVYNELTKVKYVTEGMRKPAFLSGEQKKAIVDLLFKTNRKVTVKQLKEDYFKKIECFDSVEISGVEDRFNASLGTYHDLLKIIKDKDFLDNEENEDILEDIVLTLTLFEDREMIEERLKTYAHLFDDKVMKQLKRRRYTGWGRLSRKLINGIRDKQSGKTILDFLKSDGFANRNFMQLIHDDSLTFKEDIQKAQVSGQGDSLHEHIANLAGSPAIKKGILQTVKVVDELVKVMGRHKPENIVIEMARENQTTQKGQKNSRERMKRIEEGIKELGSQILKEHPVENTQLQNEKLYLYYLQNGRDMYVDQELDINRLSDYDVDHIVPQSFLKDDSIDNKVLTRSDKARGKSDNVPSEEVVKKMKNYWRQLLNAKLITQRKFDNLTKAERGGLSELDKAGFIKRQLVETRQITKHVAQILDSRMNTKYDENDKLIREVKVITLKSKLVSDFRKDFQFYKVREINNYHHAHDAYLNAVVGTALIKKYPKLESEFVYGDYKVYDVRKMIAKSEQEIGKATAKYFFYSNIMNFFKTEITLANGEIRKRPLIETNGETGEIVWDKGRDFATVRKVLSMPQVNIVKKTEVQTGGFSKESILPKRNSDKLIARKKDWDPKKYGGFDSPTVAYSVLVVAKVEKGKSKKLKSVKELLGITIMERSSFEKNPIDFLEAKGYKEVKKDLIIKLPKYSLFELENGRKRMLASAGELQKGNELALPSKYVNFLYLASHYEKLKGSPEDNEQKQLFVEQHKHYLDEIIEQISEFSKRVILADANLDKVLSAYNKHRDKPIREQAENIIHLFTLTNLGAPAAFKYFDTTIDRKRYTSTKEVLDATLIHQSITGLYETRIDLSQLGGDGGGSSPAPEAAAKGGTLGIEDEYRLHETSTEPDVSLGSTWLSDFPQAWAETGGMGLAVRQAPLIIPLKATSTPVSIQQYPMSHEARLGIKPHIQRLLDQGILVPCQSPWNTPLLPVKKPGTNDYRPVQDLREVNKRVEDIHPTVPNPYNLLSGLPPSHQWYTVLDLKDAFFCLRLHPTSQPLFAFEWRDPGMGISGQLTWTRLPQGFKNSPTLFNEALHRDLADFRIQHPDLILLQYVDDILLAATSELDCQQGTRALLQTLGDLGYRASAKKAQICQKQVKYLGYLLREGQRWLTEARKETVMGQPVPKTPRQLREFLGTAGFCRLWIPGFAEMAAPLYPLTKPGTLFSWGPDQQKAYQEIKQALLTAPALGLPDLTKPFELFVDEKQGYAKGVLTQKLGPWRRPVAYLSKKLDPVAAGWPPCLRMVAAIAVLTKDAGKLTMGQPLVILAPHAVEALVKQPPDRWLSNARMTHYQAMLLDTDRVQFGPVVALNPATLLPLPEEGAPHDCLEILAETHGTRPDLTDQPIPDADHTWYTDGSSFLQEGQRKAGAAVTTETEVIWAGALPAGTSAQRAELIALTQALKMAEGKRLNVYTDSRYAFATAHIHGEIYRRRGWLTSEGREIKNKSEILALLKALFLPKRLSIIHCLGHQKGDSAEARGNRLADQAAREAAIKTPPDTSTLLAGKRTADGSEFEKRTADGSEFESPKKKAKVE

SEQ ID NO: 7593 - protein, 2096 aa, synthetic construct
MPAAKRVKLDGGDKKYSIGLDIGTNSVGWAVITDEYKVPSKKFKVLGNTDRHSIKKNLIGALLFDSGETAEATRLKRTARRRYTRRKNRICYLQEIFSNEMAKVDDSFFHRLEESFLVEEDKKHERHPIFGNIVDEVAYHEKYPTIYHLRKKLVDSTDKADLRLIYLALAHMIKFRGHFLIEGDLNPDNSDVDKLFIQLVQTYNQLFEENPINASGVDAKAILSARLSKSRRLENLIAQLPGEKKNGLFGNLIALSLGLTPNFKSNFDLAEDAKLQLSKDTYDDDLDNLLAQIGDQYADLFLAAKNLSDAILLSDILRVNTEITKAPLSASMIKRYDEHHQDLTLLKALVRQQLPEKYKEIFFDQSKNGYAGYIDGGASQEEFYKFIKPILEKMDGTEELLVKLNREDLLRKQRTFDNGSIPHQIHLGELHAILRRQEDFYPFLKDNREKIEKILTFRIPYYVGPLARGNSRFAWMTRKSEETITPWNFEEVVDKGASAQSFIERMTNFDKNLPNEKVLPKHSLLYEYFTVYNELTKVKYVTEGMRKPAFLSGEQKKAIVDLLFKTNRKVTVKQLKEDYFKKIECFDSVEISGVEDRFNASLGTYHDLLKIIKDKDFLDNEENEDILEDIVLTLTLFEDREMIEERLKTYAHLFDDKVMKQLKRRRYTGWGRLSRKLINGIRDKQSGKTILDFLKSDGFANRNFMQLIHDDSLTFKEDIQKAQVSGQGDSLHEHIANLAGSPAIKKGILQTVKVVDELVKVMGRHKPENIVIEMARENQTTQKGQKNSRERMKRIEEGIKELGSQILKEHPVENTQLQNEKLYLYYLQNGRDMYVDQELDINRLSDYDVDHIVPQSFLKDDSIDNKVLTRSDKARGKSDNVPSEEVVKKMKNYWRQLLNAKLITQRKFDNLTKAERGGLSELDKAGFIKRQLVETRQITKHVAQILDSRMNTKYDENDKLIREVKVITLKSKLVSDFRKDFQFYKVREINNYHHAHDAYLNAVVGTALIKKYPKLESEFVYGDYKVYDVRKMIAKSEQEIGKATAKYFFYSNIMNFFKTEITLANGEIRKRPLIETNGETGEIVWDKGRDFATVRKVLSMPQVNIVKKTEVQTGGFSKESILPKRNSDKLIARKKDWDPKKYGGFDSPTVAYSVLVVAKVEKGKSKKLKSVKELLGITIMERSSFEKNPIDFLEAKGYKEVKKDLIIKLPKYSLFELENGRKRMLASAGELQKGNELALPSKYVNFLYLASHYEKLKGSPEDNEQKQLFVEQHKHYLDEIIEQISEFSKRVILADANLDKVLSAYNKHRDKPIREQAENIIHLFTLTNLGAPAAFKYFDTTIDRKRYTSTKEVLDATLIHQSITGLYETRIDLSQLGGDGGGSSPAPEAAAKGGTLNIEDEHRLHETSKEPDVSLGSTWLSDFPQAWAETGGMGLAVRQAPLIIPLKATSTPVSIKQYPMSQEARLGIKPHIQRLLDQGILVPCQSPWNTPLLPVKKPGTNDYRPVQDLREVNKRVEDIHPTVPNPYNLLSGLPPSHQWYTVLDLKDAFFCLRLHPTSQPLFAFEWRDPEMGISGQLTWTRLPQGFKNSPTLFDEALHRDLADFRIQHPDLILLQYVDDLLLAATSELDCQQGTRALLQTLGNLGYRASAKKAQICQKQVKYLGYLLKEGQRWLTEARKETVMGQPTPKTPRQLREFLGTAGFCRLWIPGFAEMAAPLYPLTKTGTLFNWGPDQQKAYQEIKQALLTAPALGLPDLTKPFELFVDEKQGYAKGVLTQKLGPWRRPVAYLSKKLDPVAAGWPPCLRMVAAIAVLTKDAGKLTMGQPLVILAPHAVEALVKQPPDRWLSNARMTHYQALLLDTDRVQFGPVVALNPATLLPLPEEGLQHNCLDILAEAHGTRPDLTDQPLPDADHTWYTDGSSLLQEGQRKAGAAVTTETEVIWAKALPAGTSAQRAELIALTQALKMAEGKKLNVYTDSRYAFATAHIHGEIYRRRGLLTSEGKEIKNKDEILALLKALFLPKRLSIIHCPGHQKGHSAEARGNRMADQAARKAAITETPDTSTLLAGKRTADGSEFEKRTADGSEFESPKKKAKVE

SEQ ID NO: 7594 - protein, 2096 aa, synthetic construct; identical to SEQ ID NO: 7593

SEQ ID NO: 7595 - protein, 2096 aa, synthetic construct
MPAAKRVKLDGGDKKYSIGLDIGTNSVGWAVITDEYKVPSKKFKVLGNTDRHSIKKNLIGALLFDSGETAEATRLKRTARRRYTRRKNRICYLQEIFSNEMAKVDDSFFHRLEESFLVEEDKKHERHPIFGNIVDEVAYHEKYPTIYHLRKKLVDSTDKADLRLIYLALAHMIKFRGHFLIEGDLNPDNSDVDKLFIQLVQTYNQLFEENPINASGVDAKAILSARLSKSRRLENLIAQLPGEKKNGLFGNLIALSLGLTPNFKSNFDLAEDAKLQLSKDTYDDDLDNLLAQIGDQYADLFLAAKNLSDAILLSDILRVNTEITKAPLSASMIKRYDEHHQDLTLLKALVRQQLPEKYKEIFFDQSKNGYAGYIDGGASQEEFYKFIKPILEKMDGTEELLVKLNREDLLRKQRTFDNGSIPHQIHLGELHAILRRQEDFYPFLKDNREKIEKILTFRIPYYVGPLARGNSRFAWMTRKSEETITPWNFEEVVDKGASAQSFIERMTNFDKNLPNEKVLPKHSLLYEYFTVYNELTKVKYVTEGMRKPAFLSGEQKKAIVDLLFKTNRKVTVKQLKEDYFKKIECFDSVEISGVEDRFNASLGTYHDLLKIIKDKDFLDNEENEDILEDIVLTLTLFEDREMIEERLKTYAHLFDDKVMKQLKRRRYTGWGRLSRKLINGIRDKQSGKTILDFLKSDGFANRNFMQLIHDDSLTFKEDIQKAQVSGQGDSLHEHIANLAGSPAIKKGILQTVKVVDELVKVMGRHKPENIVIEMARENQTTQKGQKNSRERMKRIEEGIKELGSQILKEHPVENTQLQNEKLYLYYLQNGRDMYVDQELDINRLSDYDVDHIVPQSFLKDDSIDNKVLTRSDKARGKSDNVPSEEVVKKMKNYWRQLLNAKLITQRKFDNLTKAERGGLSELDKAGFIKRQLVETRQITKHVAQILDSRMNTKYDENDKLIREVKVITLKSKLVSDFRKDFQFYKVREINNYHHAHDAYLNAVVGTALIKKYPKLESEFVYGDYKVYDVRKMIAKSEQEIGKATAKYFFYSNIMNFFKTEITLANGEIRKRPLIETNGETGEIVWDKGRDFATVRKVLSMPQVNIVKKTEVQTGGFSKESILPKRNSDKLIARKKDWDPKKYGGFDSPTVAYSVLVVAKVEKGKSKKLKSVKELLGITIMERSSFEKNPIDFLEAKGYKEVKKDLIIKLPKYSLFELENGRKRMLASAGELQKGNELALPSKYVNFLYLASHYEKLKGSPEDNEQKQLFVEQHKHYLDEIIEQISEFSKRVILADANLDKVLSAYNKHRDKPIREQAENIIHLFTLTNLGAPAAFKYFDTTIDRKRYTSTKEVLDATLIHQSITGLYETRIDLSQLGGDGGGSSPAPEAAAKGGTLNIEDEYRLHEISTEPDVSPGSTWLSDFPQAWAETGGMGLAVRQAPLIIPLKATSTPVSIKQYPMSQEAKLGIKPHIQRLLDQGILVPCQSPWNTPLLPVKKPGTNDYRPVQGLREVNKRVEDIHPTVPNPYNLLSGLPTSHRWYTVLDLKDAFFCLRLHPTSQPLFASEWRDPGMGISGQLTWTRLPQGFKNSPTLFNEALHRGLADFRIQHPDLILLQYVDDLLLAATSELDCQQGTRALLKTLGNLGYRASAKKAQICQKQVKYLGYLLREGQRWLTEARKETVMGQPTPKTPRQLREFLGTAGFCRLWIPRFAEMAAPLYPLTKPGTLFNWGPDQQKAYHEIKQALLTAPALGLPDLTKPFELFVDEKQGYAKGVLTQKLGPWRRPVAYLSKKLDPVAAGWPPCLRMVAAIAVLTKDAGKLTMGQPLVILAPHAVEALVKQPPDRWLSNARMTHYQAMLLDTDRVQFGPVVALNPATLLPLPEEGAPHDCLEILAETHGTEPDLTDQPIPDADHTWYTDGSSFLQEGQRKAGAAVTTETEVIWARALPAGTSAQRAELIALTQALKMAEGKRLNVYTDSRYAFATAHIHGEIYKRRGWLTSEGREIKNKSEILALLKALFLPKRLSIIHCLGHQKGDSAEARGNRLADQAAREAAIKTPPDTSTLLAGKRTADGSEFEKRTADGSEFESPKKKAKVE

SEQ ID NO: 7596 - protein, 2090 aa, synthetic construct
MPAAKRVKLDGGDKKYSIGLDIGTNSVGWAVITDEYKVPSKKFKVLGNTDRHSIKKNLIGALLFDSGETAEATRLKRTARRRYTRRKNRICYLQEIFSNEMAKVDDSFFHRLEESFLVEEDKKHERHPIFGNIVDEVAYHEKYPTIYHLRKKLVDSTDKADLRLIYLALAHMIKFRGHFLIEGDLNPDNSDVDKLFIQLVQTYNQLFEENPINASGVDAKAILSARLSKSRRLENLIAQLPGEKKNGLFGNLIALSLGLTPNFKSNFDLAEDAKLQLSKDTYDDDLDNLLAQIGDQYADLFLAAKNLSDAILLSDILRVNTEITKAPLSASMIKRYDEHHQDLTLLKALVRQQLPEKYKEIFFDQSKNGYAGYIDGGASQEEFYKFIKPILEKMDGTEELLVKLNREDLLRKQRTFDNGSIPHQIHLGELHAILRRQEDFYPFLKDNREKIEKILTFRIPYYVGPLARGNSRFAWMTRKSEETITPWNFEEVVDKGASAQSFIERMTNFDKNLPNEKVLPKHSLLYEYFTVYNELTKVKYVTEGMRKPAFLSGEQKKAIVDLLFKTNRKVTVKQLKEDYFKKIECFDSVEISGVEDRFNASLGTYHDLLKIIKDKDFLDNEENEDILEDIVLTLTLFEDREMIEERLKTYAHLFDDKVMKQLKRRRYTGWGRLSRKLINGIRDKQSGKTILDFLKSDGFANRNFMQLIHDDSLTFKEDIQKAQVSGQGDSLHEHIANLAGSPAIKKGILQTVKVVDELVKVMGRHKPENIVIEMARENQTTQKGQKNSRERMKRIEEGIKELGSQILKEHPVENTQLQNEKLYLYYLQNGRDMYVDQELDINRLSDYDVDHIVPQSFLKDDSIDNKVLTRSDKARGKSDNVPSEEVVKKMKNYWRQLLNAKLITQRKFDNLTKAERGGLSELDKAGFIKRQLVETRQITKHVAQILDSRMNTKYDENDKLIREVKVITLKSKLVSDFRKDFQFYKVREINNYHHAHDAYLNAVVGTALIKKYPKLESEFVYGDYKVYDVRKMIAKSEQEIGKATAKYFFYSNIMNFFKTEITLANGEIRKRPLIETNGETGEIVWDKGRDFATVRKVLSMPQVNIVKKTEVQTGGFSKESILPKRNSDKLIARKKDWDPKKYGGFDSPTVAYSVLVVAKVEKGKSKKLKSVKELLGITIMERSSFEKNPIDFLEAKGYKEVKKDLIIKLPKYSLFELENGRKRMLASAGELQKGNELALPSKYVNFLYLASHYEKLKGSPEDNEQKQLFVEQHKHYLDEIIEQISEFSKRVILADANLDKVLSAYNKHRDKPIREQAENIIHLFTLTNLGAPAAFKYFDTTIDRKRYTSTKEVLDATLIHQSITGLYETRIDLSQLGGDGGGSSPAPEAAAKGGTLQLDDEYRLYSPLVKPDQNIQFWLEQFPQAWAETAGMGLAKQVPPQVIQLKASATPVSVRQYPLSKEAQEGIRPHVQRLIQQGILVPVQSPWNTPLLPVRKPGTNDYRPVQDLREVNKRVQDIHPTVPNPYNLLCALPPQRSWYTVLDLKDAFFCLRLHPTSQPLFAFEWRDPGTGRTGQLTWTRLPQGFKNSPTIFDEALHRDLANFRIQHPQVTLLQYVDDLLLAGATKQDCLEGTKALLLELSDLGYRASAKKAQICRREVTYLGYSLRDGQRWLTEARKKTVVQIPAPTTAKQVREFLGTAGFCRLWIPGFATLAAPLYPLTKEKGEFSWAPEHQKAFDAIKKALLSAPALALPDVTKPFTLYVDERKGVARGVLTQTLGPWRRPVAYLSKKLDPVASGWPVCLKAIAAVAILVKDADKLTLGQNITVIAPHALENIVRQPPDRWMTNARMTHYQSLLLTERVTFAPPAALNPATLLPEETDEPVTHDCHQLLIEETGVRKDLTDIPLTGEVLTWFTDGSSYVVEGKRMAGAAVVDGTRTIWASSLPEGTSAQKAELMALTQALRLAEGKSINIYTDSRYAFATAHVHGAIYKQRGLLTSAGREIKNKEEILSLLEALHLPKRLAIIHCPGHQKAKDPISRGNQMADRVAKQAAQGVNLLAGKRTADGSEFEKRTADGSEFESPKKKAKVE

SEQ ID NO: 7597 - protein, 2090 aa, synthetic construct; identical to SEQ ID NO: 7596

SEQ ID NO: 7598 - protein, 2176 aa, synthetic construct
MPAAKRVKLDGGDKKYSIGLDIGTNSVGWAVITDEYKVPSKKFKVLGNTDRHSIKKNLIGALLFDSGETAEATRLKRTARRRYTRRKNRICYLQEIFSNEMAKVDDSFFHRLEESFLVEEDKKHERHPIFGNIVDEVAYHEKYPTIYHLRKKLVDSTDKADLRLIYLALAHMIKFRGHFLIEGDLNPDNSDVDKLFIQLVQTYNQLFEENPINASGVDAKAILSARLSKSRRLENLIAQLPGEKKNGLFGNLIALSLGLTPNFKSNFDLAEDAKLQLSKDTYDDDLDNLLAQIGDQYADLFLAAKNLSDAILLSDILRVNTEITKAPLSASMIKRYDEHHQDLTLLKALVRQQLPEKYKEIFFDQSKNGYAGYIDGGASQEEFYKFIKPILEKMDGTEELLVKLNREDLLRKQRTFDNGSIPHQIHLGELHAILRRQEDFYPFLKDNREKIEKILTFRIPYYVGPLARGNSRFAWMTRKSEETITPWNFEEVVDKGASAQSFIERMTNFDKNLPNEKVLPKHSLLYEYFTVYNELTKVKYVTEGMRKPAFLSGEQKKAIVDLLFKTNRKVTVKQLKEDYFKKIECFDSVEISGVEDRFNASLGTYHDLLKIIKDKDFLDNEENEDILEDIVLTLTLFEDREMIEERLKTYAHLFDDKVMKQLKRRRYTGWGRLSRKLINGIRDKQSGKTILDFLKSDGFANRNFMQLIHDDSLTFKEDIQKAQVSGQGDSLHEHIANLAGSPAIKKGILQTVKVVDELVKVMGRHKPENIVIEMARENQTTQKGQKNSRERMKRIEEGIKELGSQILKEHPVENTQLQNEKLYLYYLQNGRDMYVDQELDINRLSDYDVDHIVPQSFLKDDSIDNKVLTRSDKARGKSDNVPSEEVVKKMKNYWRQLLNAKLITQRKFDNLTKAERGGLSELDKAGFIKRQLVETRQITKHVAQILDSRMNTKYDENDKLIREVKVITLKSKLVSDFRKDFQFYKVREINNYHHAHDAYLNAVVGTALIKKYPKLESEFVYGDYKVYDVRKMIAKSEQEIGKATAKYFFYSNIMNFFKTEITLANGEIRKRPLIETNGETGEIVWDKGRDFATVRKVLSMPQVNIVKKTEVQTGGFSKESILPKRNSDKLIARKKDWDPKKYGGFDSPTVAYSVLVVAKVEKGKSKKLKSVKELLGITIMERSSFEKNPIDFLEAKGYKEVKKDLIIKLPKYSLFELENGRKRMLASAGELQKGNELALPSKYVNFLYLASHYEKLKGSPEDNEQKQLFVEQHKHYLDEIIEQISEFSKRVILADANLDKVLSAYNKHRDKPIREQAENIIHLFTLTNLGAPAAFKYFDTTIDRKRYTSTKEVLDATLIHQSITGLYETRIDLSQLGGDGGGSSPAPEAAAKGGMDPLQLLQPLEAEIKGTKLKAHWNSGATITCVPEAFLEDERPIQTMLIKTIHGEKQQDVYYLTFKVQGRKVEAEVLASPYDYILLNPSDVPWLMKKPLQLTVLVPLHEYQERLLQQTALPKEQKELLQKLFLKYDALWQHWENQVGHRRIKPHNIATGTLAPRPQKQYPINPKAKPSIQIVIDDLLKQGVLIQQNSTMNTPVYPVPKPDGKWRMVLDYREVNKTIPLIAAQNQHSAGILSSIYRGKYKTTLDLTNGFWAHPITPESYWLTAFTWQGKQYCWTRLPQGFLNSPALFTADVVDLLKEIPNVQAYVDDIYISHDDPQEHLEQLEKIFSILLNAGYVVSLKKSEIAQREVEFLGFNITKEGRGLTDTFKQKLLNITPPKDLKQLQSILGLLNFARNFIPNYSELVKPLYTIVANANGKFISWTEDNSNQLQHIISVLNQADNLEERNPETRLIIKVNSSPSAGYIRYYNEGSKRPIMYVNYIFSKAEAKFTQTEKLLTTMHKGLIKAMDLAMGQEILVYSPIVSMTKIQRTPLPERKALPVRWITWMTYLEDPRIQFHYDKSLPELQQIPNVTEDVIAKTKHPSEFAMVFYTDGSAIKHPDVNKSHSAGMGIAQVQFIPEYKIVHQWSIPLGDHTAQLAEIAAVEFACKKALKISGPVLIVTDSFYVAESANKELPYWKSNGFLNNKKKPLRHVSKWKSIAECLQLKPDIIIMHEKGHQQPMTTLHTEGNNLADKLATQGSYVVHAGKRTADGSEFEKRTADGSEFESPKKKAKVE

SEQ ID NO: 7599 - protein, 2087 aa, synthetic construct
MPAAKRVKLDGGDKKYSIGLDIGTNSVGWAVITDEYKVPSKKFKVLGNTDRHSIKKNLIGALLFDSGETAEATRLKRTARRRYTRRKNRICYLQEIFSNEMAKVDDSFFHRLEESFLVEEDKKHERHPIFGNIVDEVAYHEKYPTIYHLRKKLVDSTDKADLRLIYLALAHMIKFRGHFLIEGDLNPDNSDVDKLFIQLVQTYNQLFEENPINASGVDAKAILSARLSKSRRLENLIAQLPGEKKNGLFGNLIALSLGLTPNFKSNFDLAEDAKLQLSKDTYDDDLDNLLAQIGDQYADLFLAAKNLSDAILLSDILRVNTEITKAPLSASMIKRYDEHHQDLTLLKALVRQQLPEKYKEIFFDQSKNGYAGYIDGGASQEEFYKFIKPILEKMDGTEELLVKLNREDLLRKQRTFDNGSIPHQIHLGELHAILRRQEDFYPFLKDNREKIEKILTFRIPYYVGPLARGNSRFAWMTRKSEETITPWNFEEVVDKGASAQSFIERMTNFDKNLPNEKVLPKHSLLYEYFTVYNELTKVKYVTEGMRKPAFLSGEQKKAIVDLLFKTNRKVTVKQLKEDYFKKIECFDSVEISGVEDRFNASLGTYHDLLKIIKDKDFLDNEENEDILEDIVLTLTLFEDREMIEERLKTYAHLFDDKVMKQLKRRRYTGWGRLSRKLINGIRDKQSGKTILDFLKSDGFANRNFMQLIHDDSLTFKEDIQKAQVSGQGDSLHEHIANLAGSPAIKKGILQTVKVVDELVKVMGRHKPENIVIEMARENQTTQKGQKNSRERMKRIEEGIKELGSQILKEHPVENTQLQNEKLYLYYLQNGRDMYVDQELDINRLSDYDVDHIVPQSFLKDDSIDNKVLTRSDKARGKSDNVPSEEVVKKMKNYWRQLLNAKLITQRKFDNLTKAERGGLSELDKAGFIKRQLVETRQITKHVAQILDSRMNTKYDENDKLIREVKVITLKSKLVSDFRKDFQFYKVREINNYHHAHDAYLNAVVGTALIKKYPKLESEFVYGDYKVYDVRKMIAKSEQEIGKATAKYFFYSNIMNFFKTEITLANGEIRKRPLIETNGETGEIVWDKGRDFATVRKVLSMPQVNIVKKTEVQTGGFSKESILPKRNSDKLIARKKDWDPKKYGGFDSPTVAYSVLVVAKVEKGKSKKLKSVKELLGITIMERSSFEKNPIDFLEAKGYKEVKKDLIIKLPKYSLFELENGRKRMLASAGELQKGNELALPSKYVNFLYLASHYEKLKGSPEDNEQKQLFVEQHKHYLDEIIEQISEFSKRVILADANLDKVLSAYNKHRDKPIREQAENIIHLFTLTNLGAPAAFKYFDTTIDRKRYTSTKEVLDATLIHQSITGLYETRIDLSQLGGDGGGSSPAPEAAAKGGIPWLMKKPLQLTTLVPLQEYEERLLKQTMLTGSYKEKLQSLFLKYDALWQHWENQVGHRRIKPHHIATGTVNPRPQKQYPINPKAKASIQTVINDLLKQGVLIQQNSIMNTPVYPVPKPDGKWRMVLDYREVNKTIPLIAAQNQHSAGILSSIFRGKYKTTLDLSNGFWAHSITPESYWLTAFTWLGQQYCWTRLPQGFLNSPALFNADVVDLLKEVPNVQVYVDDIYISHDDPREHLEQLEKVFSLLLNAGYVVSLKKSEIAQHEVEFLGFNITKEGRGLTETFKQKLLNITPPRDLKQLQSILGKLNFARNFIPNFSELVKPLYNIIATAPGKYITWTTDNSQQLQNIISMLNSAENLEERNPEVRLIMKVNTSPSAGYIRFYNEFAKRPIMYLNYVYTKAEVKFTNTEKLLTTIHKGLIKALDLGMGQEILVYSPIVSMTKIQKTPLPERKALPIRWITWMSYLEDPRIQFHYDKTLPELQQVPTVTDDIIAKIKHPSEFSMVFYTDGSAIKHPNVNKSHNAGMGIAQVQFKPEFTVINTWSIPLGDHTAQLAEVAAVEFACKKALKIDGPVLIVTDSFYVAESVNKELPYWQSNGFFNNKKKPLKHVSKWKSIADCIQLKPDIIIIHEKGHQPTASTFHTEGNNLADKLATQGSYVVNAGKRTADGSEFEKRTADGSEFESPKKKAKVE

SEQ ID NO: 7600 - protein, 2096 aa, synthetic construct
MPAAKRVKLDGGDKKYSIGLDIGTNSVGWAVITDEYKVPSKKFKVLGNTDRHSIKKNLIGALLFDSGETAEATRLKRTARRRYTRRKNRICYLQEIFSNEMAKVDDSFFHRLEESFLVEEDKKHERHPIFGNIVDEVAYHEKYPTIYHLRKKLVDSTDKADLRLIYLALAHMIKFRGHFLIEGDLNPDNSDVDKLFIQLVQTYNQLFEENPINASGVDAKAILSARLSKSRRLENLIAQLPGEKKNGLFGNLIALSLGLTPNFKSNFDLAEDAKLQLSKDTYDDDLDNLLAQIGDQYADLFLAAKNLSDAILLSDILRVNTEITKAPLSASMIKRYDEHHQDLTLLKALVRQQLPEKYKEIFFDQSKNGYAGYIDGGASQEEFYKFIKPILEKMDGTEELLVKLNREDLLRKQRTFDNGSIPHQIHLGELHAILRRQEDFYPFLKDNREKIEKILTFRIPYYVGPLARGNSRFAWMTRKSEETITPWNFEEVVDKGASAQSFIERMTNFDKNLPNEKVLPKHSLLYEYFTVYNELTKVKYVTEGMRKPAFLSGEQKKAIVDLLFKTNRKVTVKQLKEDYFKKIECFDSVEISGVEDRFNASLGTYHDLLKIIKDKDFLDNEENEDILEDIVLTLTLFEDREMIEERLKTYAHLFDDKVMKQLKRRRYTGWGRLSRKLINGIRDKQSGKTILDFLKSDGFANRNFMQLIHDDSLTFKEDIQKAQVSGQGDSLHEHIANLAGSPAIKKGILQTVKVVDELVKVMGRHKPENIVIEMARENQTTQKGQKNSRERMKRIEEGIKELGSQILKEHPVENTQLQNEKLYLYYLQNGRDMYVDQELDINRLSDYDVDHIVPQSFLKDDSIDNKVLTRSDKARGKSDNVPSEEVVKKMKNYWRQLLNAKLITQRKFDNLTKAERGGLSELDKAGFIKRQLVETRQITKHVAQILDSRMNTKYDENDKLIREVKVITLKSKLVSDFRKDFQFYKVREINNYHHAHDAYLNAVVGTALIKKYPKLESEFVYGDYKVYDVRKMIAKSEQEIGKATAKYFFYSNIMNFFKTEITLANGEIRKRPLIETNGETGEIVWDKGRDFATVRKVLSMPQVNIVKKTEVQTGGFSKESILPKRNSDKLIARKKDWDPKKYGGFDSPTVAYSVLVVAKVEKGKSKKLKSVKELLGITIMERSSFEKNPIDFLEAKGYKEVKKDLIIKLPKYSLFELENGRKRMLASAGELQKGNELALPSKYVNFLYLASHYEKLKGSPEDNEQKQLFVEQHKHYLDEIIEQISEFSKRVILADANLDKVLSAYNKHRDKPIREQAENIIHLFTLTNLGAPAAFKYFDTTIDRKRYTSTKEVLDATLIHQSITGLYETRIDLSQLGGDGGGSSPAPEAAAKGGTLNIEDEYRLHETSKEPDVPLGSTWLSDFPQAWAETGGMGLAVRQAPLIIPLKATSTPVSIKQYPMSQEARLGIKPHIQRLLDQGILVPCQSPWNTPLLPVKKPGTNDYRPVQDLREVNKRVEDIHPTVPNPYNLLSGLPPSHQWYTVLDLKDAFFCLRLHPTSQPLFAFEWRDPEMGISGQLTWTRLPQGFKNSPTLFNEALHRDLADFRIQHPDLILLQYVDDLLLAATSEQDCQRGTRALLQTLGNLGYRASAKKAQICQKQVKYLGYLLKEGQRWLTEARKETVMGQPTPKTPRQLREFLGTAGFCRLWIPGFAEMAAPLYPLTKPGTLFNWGPDQQKAYQEIKQALLTAPALGLPDLTKPFELFVDEKQGYAKGVLTQKLGPWRRPVAYLSKKLDPVAAGWPPCLRMVAAIAVLTKDAGKLTMGQPLVILAPHAVEALVKQPPDRWLSNARMTHYQAMLLDTDRVQFGPVVALNPATLLPLPEKEAPHDCLEILAETHGTRPDLTDQPIPDADYTWYTDGSSFLQEGQRRAGAAVTTETEVIWARALPAGTSAQRAELIALTQALKMAEGKKLNVYTDSRYAFATAHVHGEIYRRRGWLTSEGREIKNKNEILALLKALFLPKRLSIIHCPGHQKGNSAEARGNRMADQAAREAAMKAVLETSTLLAGKRTADGSEFEKRTADGSEFESPKKKAKVE

SEQ ID NO: 7601 - protein, 2087 aa, synthetic construct
MPAAKRVKLDGGDKKYSIGLDIGTNSVGWAVITDEYKVPSKKFKVLGNTDRHSIKKNLIGALLFDSGETAEATRLKRTARRRYTRRKNRICYLQEIFSNEMAKVDDSFFHRLEESFLVEEDKKHERHPIFGNIVDEVAYHEKYPTIYHLRKKLVDSTDKADLRLIYLALAHMIKFRGHFLIEGDLNPDNSDVDKLFIQLVQTYNQLFEENPINASGVDAKAILSARLSKSRRLENLIAQLPGEKKNGLFGNLIALSLGLTPNFKSNFDLAEDAKLQLSKDTYDDDLDNLLAQIGDQYADLFLAAKNLSDAILLSDILRVNTEITKAPLSASMIKRYDEHHQDLTLLKALVRQQLPEKYKEIFFDQSKNGYAGYIDGGASQEEFYKFIKPILEKMDGTEELLVKLNREDLLRKQRTFDNGSIPHQIHLGELHAILRRQEDFYPFLKDNREKIEKILTFRIPYYVGPLARGNSRFAWMTRKSEETITPWNFEEVVDKGASAQSFIERMTNFDKNLPNEKVLPKHSLLYEYFTVYNELTKVKYVTEGMRKPAFLSGEQKKAIVDLLFKTNRKVTVKQLKEDYFKKIECFDSVEISGVEDRFNASLGTYHDLLKIIKDKDFLDNEENEDILEDIVLTLTLFEDREMIEERLKTYAHLFDDKVMKQLKRRRYTGWGRLSRKLINGIRDKQSGKTILDFLKSDGFANRNFMQLIHDDSLTFKEDIQKAQVSGQGDSLHEHIANLAGSPAIKKGILQTVKVVDELVKVMGRHKPENIVIEMARENQTTQKGQKNSRERMKRIEEGIKELGSQILKEHPVENTQLQNEKLYLYYLQNGRDMYVDQELDINRLSDYDVDHIVPQSFLKDDSIDNKVLTRSDKARGKSDNVPSEEVVKKMKNYWRQLLNAKLITQRKFDNLTKAERGGLSELDKAGFIKRQLVETRQITKHVAQILDSRMNTKYDENDKLIREVKVITLKSKLVSDFRKDFQFYKVREINNYHHAHDAYLNAVVGTALIKKYPKLESEFVYGDYKVYDVRKMIAKSEQEIGKATAKYFFYSNIMNFFKTEITLANGEIRKRPLIETNGETGEIVWDKGRDFATVRKVLSMPQVNIVKKTEVQTGGFSKESILPKRNSDKLIARKKDWDPKKYGGFDSPTVAYSVLVVAKVEKGKSKKLKSVKELLGITIMERSSFEKNPIDFLEAKGYKEVKKDLIIKLPKYSLFELENGRKRMLASAGELQKGNELALPSKYVNFLYLASHYEKLKGSPEDNEQKQLFVEQHKHYLDEIIEQISEFSKRVILADANLDKVLSAYNKHRDKPIREQAENIIHLFTLTNLGAPAAFKYFDTTIDRKRYTSTKEVLDATLIHQSITGLYETRIDLSQLGGDGGEAAAKGSSPAPGGVPWILKKPLELTIKLDLEEQQGTLLNNSILSKKGKEELKQLFEKYSALWQSWENQVGHRRIRPHKIATGTVKPTPQKQYHINPKAKPDIQIVINDLLKQGVLIQKESTMNTPVYPVPKPNGRWRMVLDYRAVNKVTPLIAVQNQHSYGILGSLFKGRYKTTIDLSNGFWAHPIVPEDYWITAFTWQGKQYCWTVLPQGFLNSPGLFTGDVVDLLQGIPNVEVYVDDVYISHDSEKEHLEYLDILFNRLKEAGYIISLKKSNIANSIVDFLGFQITNEGRGLTDTFKEKLENITAPTTLKQLQSILGLLNFARNFIPDFTELIAPLYALIPKSTKNYVPWQIEHSTTLETLITKLNGAEYLQGRKGDKTLIMKVNASYTTGYIRYYNEGEKKPISYVSIVFSKTELKFTELEKLLTTVHKGLLKALDLSMGQNIHVYSPIVSMQNIQKTPQTAKKALASRWLSWLSYLEDPRIRFFYDPQMPALKDLPAVDTGKDNKKHPSNFQHIFYTDGSAITSPTKEGHLNAGMGIVYFINKDGNLQKQQEWSISLGNHTAQFAEIAAFEFALKKCLPLGGNILVVTDSNYVAKAYNEELDVWASNGFVNNRKKPLKHISKWKSVADLKRLRPDVVVTHEPGHQKLDSSPHAYGNNLADQLATQASFKVHAGKRTADGSEFEKRTADGSEFESPKKKAKVE

SEQ ID NO: 7602 - protein, 2087 aa, synthetic construct
MPAAKRVKLDGGDKKYSIGLDIGTNSVGWAVITDEYKVPSKKFKVLGNTDRHSIKKNLIGALLFDSGETAEATRLKRTARRRYTRRKNRICYLQEIFSNEMAKVDDSFFHRLEESFLVEEDKKHERHPIFGNIVDEVAYHEKYPTIYHLRKKLVDSTDKADLRLIYLALAHMIKFRGHFLIEGDLNPDNSDVDKLFIQLVQTYNQLFEENPINASGVDAKAILSARLSKSRRLENLIAQLPGEKKNGLFGNLIALSLGLTPNFKSNFDLAEDAKLQLSKDTYDDDLDNLLAQIGDQYADLFLAAKNLSDAILLSDILRVNTEITKAPLSASMIKRYDEHHQDLTLLKALVRQQLPEKYKEIFFDQSKNGYAGYIDGGASQEEFYKFIKPILEKMDGTEELLVKLNREDLLRKQRTFDNGSIPHQIHLGELHAILRRQEDFYPFLKDNREKIEKILTFRIPYYVGPLARGNSRFAWMTRKSEETITPWNFEEVVDKGASAQSFIERMTNFDKNLPNEKVLPKHSLLYEYFTVYNELTKVKYVTEGMRKPAFLSGEQKKAIVDLLFKTNRKVTVKQLKEDYFKKIECFDSVEISGVEDRFNASLGTYHDLLKIIKDKDFLDNEENEDILEDIVLTLTLFEDREMIEERLKTYAHLFDDKVMKQLKRRRYTGWGRLSRKLINGIRDKQSGKTILDFLKSDGFANRNFMQLIHDDSLTFKEDIQKAQVSGQGDSLHEHIANLAGSPAIKKGILQTVKVVDELVKVMGRHKPENIVIEMARENQTTQKGQKNSRERMKRIEEGIKELGSQILKEHPVENTQLQNEKLYLYYLQNGRDMYVDQELDINRLSDYDVDHIVPQSFLKDDSIDNKVLTRSDKARGKSDNVPSEEVVKKMKNYWRQLLNAKLITQRKFDNLTKAERGGLSELDKAGFIKRQLVETRQITKHVAQILDSRMNTKYDENDKLIREVKVITLKSKLVSDFRKDFQFYKVREINNYHHAHDAYLNAVVGTALIKKYPKLESEFVYGDYKVYDVRKMIAKSEQEIGKATAKYFFYSNIMNFFKTEITLANGEIRKRPLIETNGETGEIVWDKGRDFATVRKVLSMPQVNIVKKTEVQTGGFSKESILPKRNSDKLIARKKDWDPKKYGGFDSPTVAYSVLVVAKVEKGKSKKLKSVKELLGITIMERSSFEKNPIDFLEAKGYKEVKKDLIIKLPKYSLFELENGRKRMLASAGELQKGNELALPSKYVNFLYLASHYEKLKGSPEDNEQKQLFVEQHKHYLDEIIEQISEFSKRVILADANLDKVLSAYNKHRDKPIREQAENIIHLFTLTNLGAPAAFKYFDTTIDRKRYTSTKEVLDATLIHQSITGLYETRIDLSQLGGDGGEAAAKGSSPAPGGVPWLTQQPLQLTILVPLQEYQEKILSKTALPEDQKQQLKTLFVKYDNLWQHWENQVGHRKIRPHNIATGDYPPRPQKQYPINPKAKPSIQIVIDDLLKQGVLTPQNSTMNTPVYPVPKPDGRWRMVLDYREVNKTIPLTAAQNQHSAGILATIVRQKYKTTLDLANGFWAHPITPESYWLTAFTWQGKQYCWTRLPQGFLNSPALFNADVVDLLKEIPNVQVYVDDIYLSHDDPKEHVQQLEKVFQILLQAGYVVSLKKSEIGQKTVEFLGFNITKEGRGLTDTFKTKLLNITPPKDLKQLQSILGKLNFARNFIPNFAELVQPLYNLIAPAKGKYIEWSEENTKQLNMVIEALNTASNLEERLPEQRLVIKVNTSPSAGYVRYYNETGKKPIMYLNYVFSKAELKFSMLEKLLTTMHKALIKAMDLAMGQEILVYSPIVSMTKIQKTPLPERKALPIRWITWMTYLEDPRIQFHYDKTLPELKHIPDVYTSSQSPVKHPSQYEGVFYTDGSAIKSPDPTKSNNAGMGIVHATYKPEYQVLNQWSIPLGNHTAQMAEIAAVEFACKKALKIPGPVLVITDSFYVAESANKELPYWKSNGFVNNKKKPLKHISKWKSIAECLSMKPDITIQHEKGISLQIPVFILKGNALADKLATQGSYVVNAGKRTADGSEFEKRTADGSEFESPKKKAKVE

SEQ ID NO: 7603 - protein, 2218 aa, synthetic construct
MPAAKRVKLDGGDKKYSIGLDIGTNSVGWAVITDEYKVPSKKFKVLGNTDRHSIKKNLIGALLFDSGETAEATRLKRTARRRYTRRKNRICYLQEIFSNEMAKVDDSFFHRLEESFLVEEDKKHERHPIFGNIVDEVAYHEKYPTIYHLRKKLVDSTDKADLRLIYLALAHMIKFRGHFLIEGDLNPDNSDVDKLFIQLVQTYNQLFEENPINASGVDAKAILSARLSKSRRLENLIAQLPGEKKNGLFGNLIALSLGLTPNFKSNFDLAEDAKLQLSKDTYDDDLDNLLAQIGDQYADLFLAAKNLSDAILLSDILRVNTEITKAPLSASMIKRYDEHHQDLTLLKALVRQQLPEKYKEIFFDQSKNGYAGYIDGGASQEEFYKFIKPILEKMDGTEELLVKLNREDLLRKQRTFDNGSIPHQIHLGELHAILRRQEDFYPFLKDNREKIEKILTFRIPYYVGPLARGNSRFAWMTRKSEETITPWNFEEVVDKGASAQSFIERMTNFDKNLPNEKVLPKHSLLYEYFTVYNELTKVKYVTEGMRKPAFLSGEQKKAIVDLLFKTNRKVTVKQLKEDYFKKIECFDSVEISGVEDRFNASLGTYHDLLKIIKDKDFLDNEENEDILEDIVLTLTLFEDREMIEERLKTYAHLFDDKVMKQLKRRRYTGWGRLSRKLINGIRDKQSGKTILDFLKSDGFANRNFMQLIHDDSLTFKEDIQKAQVSGQGDSLHEHIANLAGSPAIKKGILQTVKVVDELVKVMGRHKPENIVIEMARENQTTQKGQKNSRERMKRIEEGIKELGSQILKEHPVENTQLQNEKLYLYYLQNGRDMYVDQELDINRLSDYDVDHIVPQSFLKDDSIDNKVLTRSDKARGKSDNVPSEEVVKKMKNYWRQLLNAKLITQRKFDNLTKAERGGLSELDKAGFIKRQLVETRQITKHVAQILDSRMNTKYDENDKLIREVKVITLKSKLVSDFRKDFQFYKVREINNYHHAHDAYLNAVVGTALIKKYPKLESEFVYGDYKVYDVRKMIAKSEQEIGKATAKYFFYSNIMNFFKTEITLANGEIRKRPLIETNGETGEIVWDKGRDFATVRKVLSMPQVNIVKKTEVQTGGFSKESILPKRNSDKLIARKKDWDPKKYGGFDSPTVAYSVLVVAKVEKGKSKKLKSVKELLGITIMERSSFEKNPIDFLEAKGYKEVKKDLIIKLPKYSLFELENGRKRMLASAGELQKGNELALPSKYVNFLYLASHYEKLKGSPEDNEQKQLFVEQHKHYLDEIIEQISEFSKRVILADANLDKVLSAYNKHRDKPIREQAENIIHLFTLTNLGAPAAFKYFDTTIDRKRYTSTKEVLDATLIHQSITGLYETRIDLSQLGGDGGEAAAKGSSPAPGGTLGDQGSRGSDPLPEPRVTLTVEGIPTEFLVNTGAEHSVLTKPMGKMGSKRTVVAGATGSKVYPWTTKRLLKIGQKQVTHSFLVIPECPAPLLGRDLLTKLKAQIQFSTEGPQVTWEDRPAMCLVLNLEEEYRLHEKPVPPSIDPSWLQLFPMVWAEKAGMGLANQVPPVVVELKSDASPVAVRQYPMSKEAREGIRPHIQRFLDLGILVPCQSPWNTPLLPVKKPGTNDYRPVQDLREVNKRVQDIHPTVPNPYNLLSSLPPSHTWYSVLDLKDAFFCLKLHPNSQPLFAFEWRDPEKGNTGQLTWTRLPQGFKNSPTLFNEALHRDLASFRALNPQVVMLQYVDDLLVAAPTYRDCKEGTRRLLQELSKLGYRVSAKKAQLCREEVTYLGYLLKGGKRWLTPARKATVMKIPTPTTPRQVREFLGTAGFCRLWIPGFASLAAPLYPLTRPKVPFTWTEAHQEAFGRIKEALLSAPALALPDLTKPFALYVDEKEGVARGVLTQTLGPWRRPVAYLSKKLDPVASGWPTCLKAIAAVALLLKDADKLTLGQNVLVIAPHNLESIVRQPPDRWMTNARMTHYQSLLLNERVSFAPPAILNPATLLPVESDDTPIHICSEILAEETGTRPDLRDQPLPGVPAWYTDGSSFIMDGRRQAGAAIVDNKRTVWASNLPEGTSAQKAELIALTQALRLAEGKSINIYTDSRYAFATAHVHGAIYKQRGWLTSAGKDIKNKEEILALLEAIHLPKRVAIIHCPGHQRGTDPVATGNRKADEAAKQAAQSTRILTETTKNAGKRTADGSEFEKRTADGSEFESPKKKAKVE

SEQ ID NO: 7604 - protein, 2096 aa, synthetic construct
MPAAKRVKLDGGDKKYSIGLDIGTNSVGWAVITDEYKVPSKKFKVLGNTDRHSIKKNLIGALLFDSGETAEATRLKRTARRRYTRRKNRICYLQEIFSNEMAKVDDSFFHRLEESFLVEEDKKHERHPIFGNIVDEVAYHEKYPTIYHLRKKLVDSTDKADLRLIYLALAHMIKFRGHFLIEGDLNPDNSDVDKLFIQLVQTYNQLFEENPINASGVDAKAILSARLSKSRRLENLIAQLPGEKKNGLFGNLIALSLGLTPNFKSNFDLAEDAKLQLSKDTYDDDLDNLLAQIGDQYADLFLAAKNLSDAILLSDILRVNTEITKAPLSASMIKRYDEHHQDLTLLKALVRQQLPEKYKEIFFDQSKNGYAGYIDGGASQEEFYKFIKPILEKMDGTEELLVKLNREDLLRKQRTFDNGSIPHQIHLGELHAILRRQEDFYPFLKDNREKIEKILTFRIPYYVGPLARGNSRFAWMTRKSEETITPWNFEEVVDKGASAQSFIERMTNFDKNLPNEKVLPKHSLLYEYFTVYNELTKVKYVTEGMRKPAFLSGEQKKAIVDLLFKTNRKVTVKQLKEDYFKKIECFDSVEISGVEDRFNASLGTYHDLLKIIKDKDFLDNEENEDILEDIVLTLTLFEDREMIEERLKTYAHLFDDKVMKQLKRRRYTGWGRLSRKLINGIRDKQSGKTILDFLKSDGFANRNFMQLIHDDSLTFKEDIQKAQVSGQGDSLHEHIANLAGSPAIKKGILQTVKVVDELVKVMGRHKPENIVIEMARENQTTQKGQKNSRERMKRIEEGIKELGSQILKEHPVENTQLQNEKLYLYYLQNGRDMYVDQELDINRLSDYDVDHIVPQSFLKDDSIDNKVLTRSDKARGKSDNVPSEEVVKKMKNYWRQLLNAKLITQRKFDNLTKAERGGLSELDKAGFIKRQLVETRQITKHVAQILDSRMNTKYDENDKLIREVKVITLKSKLVSDFRKDFQFYKVREINNYHHAHDAYLNAVVGTALIKKYPKLESEFVYGDYKVYDVRKMIAKSEQEIGKATAKYFFYSNIMNFFKTEITLANGEIRKRPLIETNGETGEIVWDKGRDFATVRKVLSMPQVNIVKKTEVQTGGFSKESILPKRNSDKLIARKKDWDPKKYGGFDSPTVAYSVLVVAKVEKGKSKKLKSVKELLGITIMERSSFEKNPIDFLEAKGYKEVKKDLIIKLPKYSLFELENGRKRMLASAGELQKGNELALPSKYVNFLYLASHYEKLKGSPEDNEQKQLFVEQHKHYLDEIIEQISEFSKRVILADANLDKVLSAYNKHRDKPIREQAENIIHLFTLTNLGAPAAFKYFDTTIDRKRYTSTKEVLDATLIHQSITGLYETRIDLSQLGGDGGEAAAKGSSPAPGGTLNLEDEYRLYETSAEPEVSPGSTWLSDFPQAWAETGGMGLAVRQAPLIIPLKATSTPVSIKQYPMSQEAKLGIKPHIQRLLDQGILVPCQSPWNTPLLPVKKPGTNDYRPVQDLREVNKRVEDIHPTVPNPYNLLSGLPPSHRWYTVLDLKDAFFCLRLHPTSQPLFAFEWRDPGMGISGQLTWTRLPQGFKNSPTLFNEALHRDLADFRIQHPDLILLQYVDDILLAATSELDCQQGTRALLLTLGNLGYRASAKKAQLCQKQVKYLGYLLKEGQRWLTEARKETVMGQPTPKTPRQLREFLGTAGFCRLWIPGFAEMAAPLYPLTKPGTLFNWGPDQQKAYQEIKQALLTAPALGLPDLTKPFELFVDEKQGYAKGVLTQKLGPWRRPVAYLSKKLDPVAAGWPPCLRMVAAIAVLRKDAGKLTMGQPLVILAPHAVEALVKQPPDRWLSNARMTHYQAMLLDTDRVQFGPVVALNPATLLPLPEEGAPHDCLEILAETHGTRPDLTDQPIPDADHTWYTDGSSFLQEGQRKAGAAVTTETEVIWARALPAGTSAQRAELIALTQALKMAEGKRLNVYTDSRYAFATAHIHGEIYRRRGWLTSEGREIKNKSEILALLKALFLPKRLSIIHCLGHQKGDSAEARGNRLADQAAREAAIKTPPDTSTLLAGKRTADGSEFEKRTADGSEFESPKKKAKVE

SEQ ID NO: 7605 - protein, 2096 aa, synthetic construct
MPAAKRVKLDGGDKKYSIGLDIGTNSVGWAVITDEYKVPSKKFKVLGNTDRHSIKKNLIGALLFDSGETAEATRLKRTARRRYTRRKNRICYLQEIFSNEMAKVDDSFFHRLEESFLVEEDKKHERHPIFGNIVDEVAYHEKYPTIYHLRKKLVDSTDKADLRLIYLALAHMIKFRGHFLIEGDLNPDNSDVDKLFIQLVQTYNQLFEENPINASGVDAKAILSARLSKSRRLENLIAQLPGEKKNGLFGNLIALSLGLTPNFKSNFDLAEDAKLQLSKDTYDDDLDNLLAQIGDQYADLFLAAKNLSDAILLSDILRVNTEITKAPLSASMIKRYDEHHQDLTLLKALVRQQLPEKYKEIFFDQSKNGYAGYIDGGASQEEFYKFIKPILEKMDGTEELLVKLNREDLLRKQRTFDNGSIPHQIHLGELHAILRRQEDFYPFLKDNREKIEKILTFRIPYYVGPLARGNSRFAWMTRKSEETITPWNFEEVVDKGASAQSFIERMTNFDKNLPNEKVLPKHSLLYEYFTVYNELTKVKYVTEGMRKPAFLSGEQKKAIVDLLFKTNRKVTVKQLKEDYFKKIECFDSVEISGVEDRFNASLGTYHDLLKIIKDKDFLDNEENEDILEDIVLTLTLFEDREMIEERLKTYAHLFDDKVMKQLKRRRYTGWGRLSRKLINGIRDKQSGKTILDFLKSDGFANRNFMQLIHDDSLTFKEDIQKAQVSGQGDSLHEHIANLAGSPAIKKGILQTVKVVDELVKVMGRHKPENIVIEMARENQTTQKGQKNSRERMKRIEEGIKELGSQILKEHPVENTQLQNEKLYLYYLQNGRDMYVDQELDINRLSDYDVDHIVPQSFLKDDSIDNKVLTRSDKARGKSDNVPSEEVVKKMKNYWRQLLNAKLITQRKFDNLTKAERGGLSELDKAGFIKRQLVETRQITKHVAQILDSRMNTKYDENDKLIREVKVITLKSKLVSDFRKDFQFYKVREINNYHHAHDAYLNAVVGTALIKKYPKLESEFVYGDYKVYDVRKMIAKSEQEIGKATAKYFFYSNIMNFFKTEITLANGEIRKRPLIETNGETGEIVWDKGRDFATVRKVLSMPQVNIVKKTEVQTGGFSKESILPKRNSDKLIARKKDWDPKKYGGFDSPTVAYSVLVVAKVEKGKSKKLKSVKELLGITIMERSSFEKNPIDFLEAKGYKEVKKDLIIKLPKYSLFELENGRKRMLASAGELQKGNELALPSKYVNFLYLASHYEKLKGSPEDNEQKQLFVEQHKHYLDEIIEQISEFSKRVILADANLDKVLSAYNKHRDKPIREQAENIIHLFTLTNLGAPAAFKYFDTTIDRKRYTSTKEVLDATLIHQSITGLYETRIDLSQLGGDGGEAAAKGSSPAPGGTLNIEDEYRLHETSKEPDVSLGSTWLSDFPQAWAETGGMGLAVRQAPLIIPLKATSTPVSIKQYPMSQEARLGIKPHIQRLLDQGILVPCQSPWNTPLLPVKKPGTNDYRPVQDLREVNKRVEDIHPTVPNPYNLLSGLPPSHQWYTVLDLKDAFFCLRLHPTSQPLFAFEWRDPEMGISGQLTWTRLPQGFKNSPTLFDEALHRDLAGFRIQHPDLILLQYVDDLLLAATSELDCQQGTRALLQTLGDLGYRASAKKAQICQKQVKYLGYLLKEGQRWLTEARKETVMGQPIPKTPRQLREFLGTAGFCRLWIPGFAEMAAPLYPLTKTGTLFNWGPDQQKAFQEIKQALLTAPALGLPDLTKPFELFVDEKQGYAKGVLTQKLGPWRRPVAYLSKKLDPVAAGWPPCLRMVAAIAVLTKDAGKLTMGQPLVILAPHAVEALVKQPPDRWLSNARMTHYQALLLDTDRVQFGPVVALNPATLLPLPEEGLQHDCLDILAEAHGTRSDLMDQPLPDADHTWYTDGSSFLQEGQRKAGAAVTTETEVIWARALPAGTSAQRAELIALTQALKMAEGKKLNVYTDSRYAFATAHIHGEIYRRRGLLTSEGKEIKNKDEILALLKALFLPKRLSIIHCPGHQKGNSAEARGNRMADQAAREVATRETPETSTLLAGKRTADGSEFEKRTADGSEFESPKKKAKVE

SEQ ID NO: 7606 - protein, 2096 aa, synthetic construct
MPAAKRVKLDGGDKKYSIGLDIGTNSVGWAVITDEYKVPSKKFKVLGNTDRHSIKKNLIGALLFDSGETAEATRLKRTARRRYTRRKNRICYLQEIFSNEMAKVDDSFFHRLEESFLVEEDKKHERHPIFGNIVDEVAYHEKYPTIYHLRKKLVDSTDKADLRLIYLALAHMIKFRGHFLIEGDLNPDNSDVDKLFIQLVQTYNQLFEENPINASGVDAKAILSARLSKSRRLENLIAQLPGEKKNGLFGNLIALSLGLTPNFKSNFDLAEDAKLQLSKDTYDDDLDNLLAQIGDQYADLFLAAKNLSDAILLSDILRVNTEITKAPLSASMIKRYDEHHQDLTLLKALVRQQLPEKYKEIFFDQSKNGYAGYIDGGASQEEFYKFIKPILEKMDGTEELLVKLNREDLLRKQRTFDNGSIPHQIHLGELHAILRRQEDFYPFLKDNREKIEKILTFRIPYYVGPLARGNSRFAWMTRKSEETITPWNFEEVVDKGASAQSFIERMTNFDKNLPNEKVLPKHSLLYEYFTVYNELTKVKYVTEGMRKPAFLSGEQKKAIVDLLFKTNRKVTVKQLKEDYFKKIECFDSVEISGVEDRFNASLGTYHDLLKIIKDKDFLDNEENEDILEDIVLTLTLFEDREMIEERLKTYAHLFDDKVMKQLKRRRYTGWGRLSRKLINGIRDKQSGKTILDFLKSDGFANRNFMQLIHDDSLTFKEDIQKAQVSGQGDSLHEHIANLAGSPAIKKGILQTVKVVDELVKVMGRHKPENIVIEMARENQTTQKGQKNSRERMKRIEEGIKELGSQILKEHPVENTQLQNEKLYLYYLQNGRDMYVDQELDINRLSDYDVDHIVPQSFLKDDSIDNKVLTRSDKARGKSDNVPSEEVVKKMKNYWRQLLNAKLITQRKFDNLTKAERGGLSELDKAGFIKRQLVETRQITKHVAQILDSRMNTKYDENDKLIREVKVITLKSKLVSDFRKDFQFYKVREINNYHHAHDAYLNAVVGTALIKKYPKLESEFVYGDYKVYDVRKMIAKSEQEIGKATAKYFFYSNIMNFFKTEITLANGEIRKRPLIETNGETGEIVWDKGRDFATVRKVLSMPQVNIVKKTEVQTGGFSKESILPKRNSDKLIARKKDWDPKKYGGFDSPTVAYSVLVVAKVEKGKSKKLKSVKELLGITIMERSSFEKNPIDFLEAKGYKEVKKDLIIKLPKYSLFELENGRKRMLASAGELQKGNELALPSKYVNFLYLASHYEKLKGSPEDNEQKQLFVEQHKHYLDEIIEQISEFSKRVILADANLDKVLSAYNKHRDKPIREQAENIIHLFTLTNLGAPAAFKYFDTTIDRKRYTSTKEVLDATLIHQSITGLYETRIDLSQLGGDGGEAAAKGSSPAPGGTLNIEDEYRLHETSKEPDVSLGSTWLSDFPQAWAETGGMGLAVRQAPLIIPLKATSTPVSIKQYPMSQEARLGIKPHIQRLLDQGILVPCQSPWNTPLLPVKKPGTNDYRPVQDLREVNKRVEDIHPTVPNPYNLLSGLPPSHQWYTVLDLKDAFFCLRLHPTSQPLFAFEWRDPEMGISGQLTWTRLPQGFKNSPTLFNEALHRDLAGFRIQHPDLILLQYVDDLLLAATSELDCQQGTRALLQTLGDLGYRASAKKAQICQKQVKYLGYLLKEGQRWLTEARKETVMGQPIPKTPRQLREFLGKAGFCRLFIPGFAEMAAPLYPLTKPGTLFNWGPDQQKAFQEIKQALLTAPALGLPDLTKPFELFVDEKQGYAKGVLTQKLGPWRRPVAYLSKKLDPVAAGWPPCLRMVAAIAVLTKDAGKLTMGQPLVILAPHAVEALVKQPPDRWLSNARMTHYQALLLDTDRVQFGPVVALNPATLLPLPEEGLQHDCLDILAEAHGTRSDLMDQPLPDADHTWYTDGSSFLQEGQRKAGAAVTTETEVIWARALPAGTSAQRAELIALTQALKMAEGKKLNVYTDSRYAFATAHIHGEIYRRRGWLTSEGKEIKNKDEILALLKALFLPKRLSIIHCPGHQKGNSAEARGNRMADQAAREVATRETPETSTLLAGKRTADGSEFEKRTADGSEFESPKKKAKVE

SEQ ID NO: 7607 - protein, 2096 aa, synthetic construct
MPAAKRVKLDGGDKKYSIGLDIGTNSVGWAVITDEYKVPSKKFKVLGNTDRHSIKKNLIGALLFDSGETAEATRLKRTARRRYTRRKNRICYLQEIFSNEMAKVDDSFFHRLEESFLVEEDKKHERHPIFGNIVDEVAYHEKYPTIYHLRKKLVDSTDKADLRLIYLALAHMIKFRGHFLIEGDLNPDNSDVDKLFIQLVQTYNQLFEENPINASGVDAKAILSARLSKSRRLENLIAQLPGEKKNGLFGNLIALSLGLTPNFKSNFDLAEDAKLQLSKDTYDDDLDNLLAQIGDQYADLFLAAKNLSDAILLSDILRVNTEITKAPLSASMIKRYDEHHQDLTLLKALVRQQLPEKYKEIFFDQSKNGYAGYIDGGASQEEFYKFIKPILEKMDGTEELLVKLNREDLLRKQRTFDNGSIPHQIHLGELHAILRRQEDFYPFLKDNREKIEKILTFRIPYYVGPLARGNSRFAWMTRKSEETITPWNFEEVVDKGASAQSFIERMTNFDKNLPNEKVLPKHSLLYEYFTVYNELTKVKYVTEGMRKPAFLSGEQKKAIVDLLFKTNRKVTVKQLKEDYFKKIECFDSVEISGVEDRFNASLGTYHDLLKIIKDKDFLDNEENEDILEDIVLTLTLFEDREMIEERLKTYAHLFDDKVMKQLKRRRYTGWGRLSRKLINGIRDKQSGKTILDFLKSDGFANRNFMQLIHDDSLTFKEDIQKAQVSGQGDSLHEHIANLAGSPAIKKGILQTVKVVDELVKVMGRHKPENIVIEMARENQTTQKGQKNSRERMKRIEEGIKELGSQILKEHPVENTQLQNEKLYLYYLQNGRDMYVDQELDINRLSDYDVDHIVPQSFLKDDSIDNKVLTRSDKARGKSDNVPSEEVVKKMKNYWRQLLNAKLITQRKFDNLTKAERGGLSELDKAGFIKRQLVETRQITKHVAQILDSRMNTKYDENDKLIREVKVITLKSKLVSDFRKDFQFYKVREINNYHHAHDAYLNAVVGTALIKKYPKLESEFVYGDYKVYDVRKMIAKSEQEIGKATAKYFFYSNIMNFFKTEITLANGEIRKRPLIETNGETGEIVWDKGRDFATVRKVLSMPQVNIVKKTEVQTGGFSKESILPKRNSDKLIARKKDWDPKKYGGFDSPTVAYSVLVVAKVEKGKSKKLKSVKELLGITIMERSSFEKNPIDFLEAKGYKEVKKDLIIKLPKYSLFELENGRKRMLASAGELQKGNELALPSKYVNFLYLASHYEKLKGSPEDNEQKQLFVEQHKHYLDEIIEQISEFSKRVILADANLDKVLSAYNKHRDKPIREQAENIIHLFTLTNLGAPAAFKYFDTTIDRKRYTSTKEVLDATLIHQSITGLYETRIDLSQLGGDGGEAAAKGSSPAPGGTLNIEDEHRLHETSKEPDVSLGSTWLSDFPQAWAETGGMGLAVRQAPLIIPLKATSTPVSIKQYPMSQEARLGIKPHIQRLLDQGILVPCQSPWNTPLLPVKKPGTNDYRPVQDLREVNKRVEDIHPTVPNPYNLLSGLPPSHQWYTVLDLKDAFFCLRLHPTSQPLFAFEWRDPEMGISGQLTWTRLPQGFKNSPTLFDEALHRDLADFRIQHPDLILLQYVDDLLLAATSELDCQQGTRALLQTLGNLGYRASAKKAQICQKQVKYLGYLLKEGQRWLTEARKETVMGQPTPKTPRQLREFLGTAGFCRLWIPGFAEMAAPLYPLTKTGTLFNWGPDQQKAYQEIKQALLTAPALGLPDLTKPFELFVDEKQGYAKGVLTQKLGPWRRPVAYLSKKLDPVAAGWPPCLRMVAAIAVLTKDAGKLTMGQPLVILAPHAVEALVKQPPDRWLSNARMTHYQALLLDTDRVQFGPVVALNPATLLPLPEEGLQHNCLDILAEAHGTRPDLTDQPLPDADHTWYTDGSSLLQEGQRKAGAAVTTETEVIWAKALPAGTSAQRAELIALTQALKMAEGKKLNVYTDSRYAFATAHIHGEIYRRRGLLTSEGKEIKNKDEILALLKALFLPKRLSIIHCPGHQKGHSAEARGNRMADQAARKAAITETPDTSTLLAGKRTADGSEFEKRTADGSEFESPKKKAKVE

SEQ ID NO: 7608 - protein, 2024 aa, synthetic construct
MPAAKRVKLDGGDKKYSIGLDIGTNSVGWAVITDEYKVPSKKFKVLGNTDRHSIKKNLIGALLFDSGETAEATRLKRTARRRYTRRKNRICYLQEIFSNEMAKVDDSFFHRLEESFLVEEDKKHERHPIFGNIVDEVAYHEKYPTIYHLRKKLVDSTDKADLRLIYLALAHMIKFRGHFLIEGDLNPDNSDVDKLFIQLVQTYNQLFEENPINASGVDAKAILSARLSKSRRLENLIAQLPGEKKNGLFGNLIALSLGLTPNFKSNFDLAEDAKLQLSKDTYDDDLDNLLAQIGDQYADLFLAAKNLSDAILLSDILRVNTEITKAPLSASMIKRYDEHHQDLTLLKALVRQQLPEKYKEIFFDQSKNGYAGYIDGGASQEEFYKFIKPILEKMDGTEELLVKLNREDLLRKQRTFDNGSIPHQIHLGELHAILRRQEDFYPFLKDNREKIEKILTFRIPYYVGPLARGNSRFAWMTRKSEETITPWNFEEVVDKGASAQSFIERMTNFDKNLPNEKVLPKHSLLYEYFTVYNELTKVKYVTEGMRKPAFLSGEQKKAIVDLLFKTNRKVTVKQLKEDYFKKIECFDSVEISGVEDRFNASLGTYHDLLKIIKDKDFLDNEENEDILEDIVLTLTLFEDREMIEERLKTYAHLFDDKVMKQLKRRRYTGWGRLSRKLINGIRDKQSGKTILDFLKSDGFANRNFMQLIHDDSLTFKEDIQKAQVSGQGDSLHEHIANLAGSPAIKKGILQTVKVVDELVKVMGRHKPENIVIEMARENQTTQKGQKNSRERMKRIEEGIKELGSQILKEHPVENTQLQNEKLYLYYLQNGRDMYVDQELDINRLSDYDVDHIVPQSFLKDDSIDNKVLTRSDKARGKSDNVPSEEVVKKMKNYWRQLLNAKLITQRKFDNLTKAERGGLSELDKAGFIKRQLVETRQITKHVAQILDSRMNTKYDENDKLIREVKVITLKSKLVSDFRKDFQFYKVREINNYHHAHDAYLNAVVGTALIKKYPKLESEFVYGDYKVYDVRKMIAKSEQEIGKATAKYFFYSNIMNFFKTEITLANGEIRKRPLIETNGETGEIVWDKGRDFATVRKVLSMPQVNIVKKTEVQTGGFSKESILPKRNSDKLIARKKDWDPKKYGGFDSPTVAYSVLVVAKVEKGKSKKLKSVKELLGITIMERSSFEKNPIDFLEAKGYKEVKKDLIIKLPKYSLFELENGRKRMLASAGELQKGNELALPSKYVNFLYLASHYEKLKGSPEDNEQKQLFVEQHKHYLDEIIEQISEFSKRVILADANLDKVLSAYNKHRDKPIREQAENIIHLFTLTNLGAPAAFKYFDTTIDRKRYTSTKEVLDATLIHQSITGLYETRIDLSQLGGDGGEAAAKGSSPAPGGGRDIMKDIKVRLMTDSPDDSQDLMIGAIESNLFADQISWKSDQPVWLNQWPLKQEKLQALQQLVTEQLQLGHLEESNSPWNTPVFVIKKKSGKWRLLQDLRAVNATMHDMGALQPGLPSPVAPPKGWEIIIIDLQDCFFNIKLHPEDCKRFAFSVPSPNFKRPYQRFQWKVLPQGMKNSPTLCQKFVDKAILTVRDKYQDSYIVHYMDDILLAHPSRSIVDEILTSMIQALNKHGLVVSTEKIQKYDNLKYLGTHIQGDSVSYQKLQIRTDKLRTLNDFQKLLGNINWIRPFLKLTTGELKPLFEILNPDSNPISTRKLTPEACKALQLMNERLSTARVKRLDLSQPWSLCILKTEYTPTACLWQDGVVEWIHLPHISPKVITPYDIFCTQLIIKGRHRSKELFSKDPDYIVVPYTKVQFDLLLQEKEDWPISLLGFLGEVHFHLPKDPLLTFTLQTAIIFPHMTSTTPLEKGIVIFTDGSANGRSVTYIQGREPIIKENTQNTAQQAEIVAVITAFEEVSQPFNLYTDSKYVTGLFPEIETATLSPRTKIYTELKHLQRLIHKRQEKFYIGHIRGHTGLPGPLAQGNAYADSLTRILTAGKRTADGSEFEKRTADGSEFESPKKKAKVE

SEQ ID NO: 7609 - protein, 2176 aa, synthetic construct
MPAAKRVKLDGGDKKYSIGLDIGTNSVGWAVITDEYKVPSKKFKVLGNTDRHSIKKNLIGALLFDSGETAEATRLKRTARRRYTRRKNRICYLQEIFSNEMAKVDDSFFHRLEESFLVEEDKKHERHPIFGNIVDEVAYHEKYPTIYHLRKKLVDSTDKADLRLIYLALAHMIKFRGHFLIEGDLNPDNSDVDKLFIQLVQTYNQLFEENPINASGVDAKAILSARLSKSRRLENLIAQLPGEKKNGLFGNLIALSLGLTPNFKSNFDLAEDAKLQLSKDTYDDDLDNLLAQIGDQYADLFLAAKNLSDAILLSDILRVNTEITKAPLSASMIKRYDEHHQDLTLLKALVRQQLPEKYKEIFFDQSKNGYAGYIDGGASQEEFYKFIKPILEKMDGTEELLVKLNREDLLRKQRTFDNGSIPHQIHLGELHAILRRQEDFYPFLKDNREKIEKILTFRIPYYVGPLARGNSRFAWMTRKSEETITPWNFEEVVDKGASAQSFIERMTNFDKNLPNEKVLPKHSLLYEYFTVYNELTKVKYVTEGMRKPAFLSGEQKKAIVDLLFKTNRKVTVKQLKEDYFKKIECFDSVEISGVEDRFNASLGTYHDLLKIIKDKDFLDNEENEDILEDIVLTLTLFEDREMIEERLKTYAHLFDDKVMKQLKRRRYTGWGRLSRKLINGIRDKQSGKTILDFLKSDGFANRNFMQLIHDDSLTFKEDIQKAQVSGQGDSLHEHIANLAGSPAIKKGILQTVKVVDELVKVMGRHKPENIVIEMARENQTTQKGQKNSRERMKRIEEGIKELGSQILKEHPVENTQLQNEKLYLYYLQNGRDMYVDQELDINRLSDYDVDHIVPQSFLKDDSIDNKVLTRSDKARGKSDNVPSEEVVKKMKNYWRQLLNAKLITQRKFDNLTKAERGGLSELDKAGFIKRQLVETRQITKHVAQILDSRMNTKYDENDKLIREVKVITLKSKLVSDFRKDFQFYKVREINNYHHAHDAYLNAVVGTALIKKYPKLESEFVYGDYKVYDVRKMIAKSEQEIGKATAKYFFYSNIMNFFKTEITLANGEIRKRPLIETNGETGEIVWDKGRDFATVRKVLSMPQVNIVKKTEVQTGGFSKESILPKRNSDKLIARKKDWDPKKYGGFDSPTVAYSVLVVAKVEKGKSKKLKSVKELLGITIMERSSFEKNPIDFLEAKGYKEVKKDLIIKLPKYSLFELENGRKRMLASAGELQKGNELALPSKYVNFLYLASHYEKLKGSPEDNEQKQLFVEQHKHYLDEIIEQISEFSKRVILADANLDKVLSAYNKHRDKPIREQAENIIHLFTLTNLGAPAAFKYFDTTIDRKRYTSTKEVLDATLIHQSITGLYETRIDLSQLGGDGGEAAAKGSSPAPGGMDPLQLLQPLEAEIKGTKLKAHWNSGATITCVPEAFLEDERPIQTMLIKTIHGEKQQDVYYLTFKVQGRKVEAEVLASPYDYILLNPSDVPWLMKKPLQLTVLVPLHEYQERLLQQTALPKEQKELLQKLFLKYDALWQHWENQVGHRRIKPHNIATGTLAPRPQKQYPINPKAKPSIQIVIDDLLKQGVLIQQNSTMNTPVYPVPKPDGKWRMVLDYREVNKTIPLIAAQNQHSAGILSSIYRGKYKTTLDLTNGFWAHPITPESYWLTAFTWQGKQYCWTRLPQGFLNSPALFNADVVDLLKEIPNVQAYVDDIYISHDDPQEHLEQLEKIFSILLNAGYVVSLKKSEIAQREVEFLGFNITKEGRGLTDTFKQKLLNITPPKDLKQLQSILGKLNFARNFIPNYSELVKPLYTIVAPANGKFISWTEDNSNQLQHIISVLNQADNLEERNPETRLIIKVNSSPSAGYIRYYNEGSKRPIMYVNYIFSKAEAKFTQTEKLLTTMHKGLIKAMDLAMGQEILVYSPIVSMTKIQRTPLPERKALPVRWITWMTYLEDPRIQFHYDKSLPELQQIPNVTEDVIAKTKHPSEFAMVFYTDGSAIKHPDVNKSHSAGMGIAQVQFIPEYKIVHQWSIPLGDHTAQLAEIAAVEFACKKALKISGPVLIVTDSFYVAESANKELPYWKSNGFLNNKKKPLRHVSKWKSIAECLQLKPDIIIMHEKGHQQPMTTLHTEGNNLADKLATQGSYVVHAGKRTADGSEFEKRTADGSEFESPKKKAKVE

SEQ ID NO: 7610 - protein, 2087 aa, synthetic construct
MPAAKRVKLDGGDKKYSIGLDIGTNSVGWAVITDEYKVPSKKFKVLGNTDRHSIKKNLIGALLFDSGETAEATRLKRTARRRYTRRKNRICYLQEIFSNEMAKVDDSFFHRLEESFLVEEDKKHERHPIFGNIVDEVAYHEKYPTIYHLRKKLVDSTDKADLRLIYLALAHMIKFRGHFLIEGDLNPDNSDVDKLFIQLVQTYNQLFEENPINASGVDAKAILSARLSKSRRLENLIAQLPGEKKNGLFGNLIALSLGLTPNFKSNFDLAEDAKLQLSKDTYDDDLDNLLAQIGDQYADLFLAAKNLSDAILLSDILRVNTEITKAPLSASMIKRYDEHHQDLTLLKALVRQQLPEKYKEIFFDQSKNGYAGYIDGGASQEEFYKFIKPILEKMDGTEELLVKLNREDLLRKQRTFDNGSIPHQIHLGELHAILRRQEDFYPFLKDNREKIEKILTFRIPYYVGPLARGNSRFAWMTRKSEETITPWNFEEVVDKGASAQSFIERMTNFDKNLPNEKVLPKHSLLYEYFTVYNELTKVKYVTEGMRKPAFLSGEQKKAIVDLLFKTNRKVTVKQLKEDYFKKIECFDSVEISGVEDRFNASLGTYHDLLKIIKDKDFLDNEENEDILEDIVLTLTLFEDREMIEERLKTYAHLFDDKVMKQLKRRRYTGWGRLSRKLINGIRDKQSGKTILDFLKSDGFANRNFMQLIHDDSLTFKEDIQKAQVSGQGDSLHEHIANLAGSPAIKKGILQTVKVVDELVKVMGRHKPENIVIEMARENQTTQKGQKNSRERMKRIEEGIKELGSQILKEHPVENTQLQNEKLYLYYLQNGRDMYVDQELDINRLSDYDVDHIVPQSFLKDDSIDNKVLTRSDKARGKSDNVPSEEVVKKMKNYWRQLLNAKLITQRKFDNLTKAERGGLSELDKAGFIKRQLVETRQITKHVAQILDSRMNTKYDENDKLIREVKVITLKSKLVSDFRKDFQFYKVREINNYHHAHDAYLNAVVGTALIKKYPKLESEFVYGDYKVYDVRKMIAKSEQEIGKATAKYFFYSNIMNFFKTEITLANGEIRKRPLIETNGETGEIVWDKGRDFATVRKVLSMPQVNIVKKTEVQTGGFSKESILPKRNSDKLIARKKDWDPKKYGGFDSPTVAYSVLVVAKVEKGKSKKLKSVKELLGITIMERSSFEKNPIDFLEAKGYKEVKKDLIIKLPKYSLFELENGRKRMLASAGELQKGNELALPSKYVNFLYLASHYEKLKGSPEDNEQKQLFVEQHKHYLDEIIEQISEFSKRVILADANLDKVLSAYNKHRDKPIREQAENIIHLFTLTNLGAPAAFKYFDTTIDRKRYTSTKEVLDATLIHQSITGLYETRIDLSQLGGDGGEAAAKGSSPAPGGIPWLMKKPLQLTTLVPLQEYEERLLKQTMLTGSYKEKLQSLFLKYDALWQHWENQVGHRRIKPHHIATGTVNPRPQKQYPINPKAKASIQTVINDLLKQGVLIQQNSIMNTPVYPVPKPDGKWRMVLDYREVNKTIPLIAAQNQHSAGILSSIFRGKYKTTLDLSNGFWAHSITPESYWLTAFTWLGQQYCWTRLPQGFLNSPALFNADVVDLLKEVPNVQVYVDDIYISHDDPREHLEQLEKVFSLLLNAGYVVSLKKSEIAQHEVEFLGFNITKEGRGLTETFKQKLLNITPPRDLKQLQSILGKLNFARNFIPNFSELVKPLYNIIATAPGKYITWTTDNSQQLQNIISMLNSAENLEERNPEVRLIMKVNTSPSAGYIRFYNEFAKRPIMYLNYVYTKAEVKFTNTEKLLTTIHKGLIKALDLGMGQEILVYSPIVSMTKIQKTPLPERKALPIRWITWMSYLEDPRIQFHYDKTLPELQQVPTVTDDIIAKIKHPSEFSMVFYTDGSAIKHPNVNKSHNAGMGIAQVQFKPEFTVINTWSIPLGDHTAQLAEVAAVEFACKKALKIDGPVLIVTDSFYVAESVNKELPYWQSNGFFNNKKKPLKHVSKWKSIADCIQLKPDIIIIHEKGHQPTASTFHTEGNNLADKLATQGSYVVNAGKRTADGSEFEKRTADGSEFESPKKKAKVE

SEQ ID NO: 7611 - protein, 2176 aa, synthetic construct
MPAAKRVKLDGGDKKYSIGLDIGTNSVGWAVITDEYKVPSKKFKVLGNTDRHSIKKNLIGALLFDSGETAEATRLKRTARRRYTRRKNRICYLQEIFSNEMAKVDDSFFHRLEESFLVEEDKKHERHPIFGNIVDEVAYHEKYPTIYHLRKKLVDSTDKADLRLIYLALAHMIKFRGHFLIEGDLNPDNSDVDKLFIQLVQTYNQLFEENPINASGVDAKAILSARLSKSRRLENLIAQLPGEKKNGLFGNLIALSLGLTPNFKSNFDLAEDAKLQLSKDTYDDDLDNLLAQIGDQYADLFLAAKNLSDAILLSDILRVNTEITKAPLSASMIKRYDEHHQDLTLLKALVRQQLPEKYKEIFFDQSKNGYAGYIDGGASQEEFYKFIKPILEKMDGTEELLVKLNREDLLRKQRTFDNGSIPHQIHLGELHAILRRQEDFYPFLKDNREKIEKILTFRIPYYVGPLARGNSRFAWMTRKSEETITPWNFEEVVDKGASAQSFIERMTNFDKNLPNEKVLPKHSLLYEYFTVYNELTKVKYVTEGMRKPAFLSGEQKKAIVDLLFKTNRKVTVKQLKEDYFKKIECFDSVEISGVEDRFNASLGTYHDLLKIIKDKDFLDNEENEDILEDIVLTLTLFEDREMIEERLKTYAHLFDDKVMKQLKRRRYTGWGRLSRKLINGIRDKQSGKTILDFLKSDGFANRNFMQLIHDDSLTFKEDIQKAQVSGQGDSLHEHIANLAGSPAIKKGILQTVKVVDELVKVMGRHKPENIVIEMARENQTTQKGQKNSRERMKRIEEGIKELGSQILKEHPVENTQLQNEKLYLYYLQNGRDMYVDQELDINRLSDYDVDHIVPQSFLKDDSIDNKVLTRSDKARGKSDNVPSEEVVKKMKNYWRQLLNAKLITQRKFDNLTKAERGGLSELDKAGFIKRQLVETRQITKHVAQILDSRMNTKYDENDKLIREVKVITLKSKLVSDFRKDFQFYKVREINNYHHAHDAYLNAVVGTALIKKYPKLESEFVYGDYKVYDVRKMIAKSEQEIGKATAKYFFYSNIMNFFKTEITLANGEIRKRPLIETNGETGEIVWDKGRDFATVRKVLSMPQVNIVKKTEVQTGGFSKESILPKRNSDKLIARKKDWDPKKYGGFDSPTVAYSVLVVAKVEKGKSKKLKSVKELLGITIMERSSFEKNPIDFLEAKGYKEVKKDLIIKLPKYSLFELENGRKRMLASAGELQKGNELALPSKYVNFLYLASHYEKLKGSPEDNEQKQLFVEQHKHYLDEIIEQISEFSKRVILADANLDKVLSAYNKHRDKPIREQAENIIHLFTLTNLGAPAAFKYFDTTIDRKRYTSTKEVLDATLIHQSITGLYETRIDLSQLGGDGGEAAAKGSSPAPGGMDPLQLLQPLEAEIKGTKLKAHWNSGATITCVPQAFLEEEVPIKNIWIKTIHGEKEQPVYYLTFKIQGRKVEAEVISSPYDYILVSPSDIPWLMKKPLQLTTLVPLQEYEERLLKQTMLTGSYKEKLQSLFLKYDALWQHWENQVGHRRIKPHHIATGTVNPRPQKQYPINPKAKASIQTVINDLLKQGVLIQQNSIMNTPVYPVPKPDGKWRMVLDYREVNKTIPLIAAQNQHSAGILSSIFRGKYKTTLDLSNGFWAHSITPESYWLTAFTWLGQQYCWTRLPQGFLNSPALFNADVVDLLKEVPNVQVYVDDIYISHDDPREHLEQLEKVFSLLLNAGYVVSLKKSEIAQHEVEFLGFNITKEGRGLTETFKQKLLNITPPRDLKQLQSILGKLNFARNFIPNFSELVKPLYNIIATAPGKYITWTTDNSQQLQNIISMLNSAENLEERNPEVRLIMKVNTSPSAGYIRFYNEFAKRPIMYLNYVYTKAEVKFTNTEKLLTTIHKGLIKALDLGMGQEILVYSPIVSMTKIQKTPLPERKALPIRWITWMSYLEDPRIQFHYDKTLPELQQVPTVTDDIIAKIKHPSEFSMVFYTDGSAIKHPNVNKSHNAGMGIAQVQFKPEFTVINTWSIPLGDHTAQLAEVAAVEFACKKALKIDGPVLIVTDSFYVAESVNKELPYWQSNGFFNNKKKPLKHVSKWKSIADCIQLKPDIIIIHEKGHQPTASTFHTEGNNLADKLATQGSYVVNAGKRTADGSEFEKRTADGSEFESPKKKAKVE

SEQ ID NO: 7612 - protein, 2098 aa, synthetic construct
MPAAKRVKLDGGDKKYSIGLDIGTNSVGWAVITDEYKVPSKKFKVLGNTDRHSIKKNLIGALLFDSGETAEATRLKRTARRRYTRRKNRICYLQEIFSNEMAKVDDSFFHRLEESFLVEEDKKHERHPIFGNIVDEVAYHEKYPTIYHLRKKLVDSTDKADLRLIYLALAHMIKFRGHFLIEGDLNPDNSDVDKLFIQLVQTYNQLFEENPINASGVDAKAILSARLSKSRRLENLIAQLPGEKKNGLFGNLIALSLGLTPNFKSNFDLAEDAKLQLSKDTYDDDLDNLLAQIGDQYADLFLAAKNLSDAILLSDILRVNTEITKAPLSASMIKRYDEHHQDLTLLKALVRQQLPEKYKEIFFDQSKNGYAGYIDGGASQEEFYKFIKPILEKMDGTEELLVKLNREDLLRKQRTFDNGSIPHQIHLGELHAILRRQEDFYPFLKDNREKIEKILTFRIPYYVGPLARGNSRFAWMTRKSEETITPWNFEEVVDKGASAQSFIERMTNFDKNLPNEKVLPKHSLLYEYFTVYNELTKVKYVTEGMRKPAFLSGEQKKAIVDLLFKTNRKVTVKQLKEDYFKKIECFDSVEISGVEDRFNASLGTYHDLLKIIKDKDFLDNEENEDILEDIVLTLTLFEDREMIEERLKTYAHLFDDKVMKQLKRRRYTGWGRLSRKLINGIRDKQSGKTILDFLKSDGFANRNFMQLIHDDSLTFKEDIQKAQVSGQGDSLHEHIANLAGSPAIKKGILQTVKVVDELVKVMGRHKPENIVIEMARENQTTQKGQKNSRERMKRIEEGIKELGSQILKEHPVENTQLQNEKLYLYYLQNGRDMYVDQELDINRLSDYDVDHIVPQSFLKDDSIDNKVLTRSDKARGKSDNVPSEEVVKKMKNYWRQLLNAKLITQRKFDNLTKAERGGLSELDKAGFIKRQLVETRQITKHVAQILDSRMNTKYDENDKLIREVKVITLKSKLVSDFRKDFQFYKVREINNYHHAHDAYLNAVVGTALIKKYPKLESEFVYGDYKVYDVRKMIAKSEQEIGKATAKYFFYSNIMNFFKTEITLANGEIRKRPLIETNGETGEIVWDKGRDFATVRKVLSMPQVNIVKKTEVQTGGFSKESILPKRNSDKLIARKKDWDPKKYGGFDSPTVAYSVLVVAKVEKGKSKKLKSVKELLGITIMERSSFEKNPIDFLEAKGYKEVKKDLIIKLPKYSLFELENGRKRMLASAGELQKGNELALPSKYVNFLYLASHYEKLKGSPEDNEQKQLFVEQHKHYLDEIIEQISEFSKRVILADANLDKVLSAYNKHRDKPIREQAENIIHLFTLTNLGAPAAFKYFDTTIDRKRYTSTKEVLDATLIHQSITGLYETRIDLSQLGGDGGEAAAKPAPGSSGGTAPLEEEYRLFLEAPIQNVTLLEQWKREIPKVWAEINPPGLASTQAPIHVQLLSTALPVRVRQYPITLEAKRSLRETIRKFRAAGILRPVHSPWNTPLLPVRKSGTSEYRMVQDLREVNKRVETIHPTVPNPYTLLSLLPPDRIWYSVLDLKDAFFCIPLAPESQLIFAFEWADAEEGESGQLTWTRLPQGFKNSPTLFNEALNRDLQGFRLDHPSVSLLQYVDDLLIAADTQAACLSATRDLLMTLAELGYRVSGKKAQLCQEEVTYLGFKIHKGSRSLSNSRTQAILQIPVPKTKRQVREFLGKIGYCRLFIPGFAELAQPLYAATRPGNDPLVWGEKEEEAFQSLKLALTQPPALALPSLDKPFQLFVEETSGAAKGVLTQALGPWKRPVAYLSKRLDPVAAGWPRCLRAIAAAALLTREASKLTFGQDIEITSSHNLESLLRSPPDKWLTNARITQYQVLLLDPPRVRFKQTAALNPATLLPETDDTLPIHHCLDTLDSLTSTRPDLTDQPLAQAEATLFTDGSSYIRDGKRYAGAAVVTLDSVIWAEPLPIGTSAQKAELIALTKALEWSKDKSVNIYTDSRYAFATLHVHGMIYRERGWLTAGGKAIKNAPEILALLTAVWLPKRVAVMHCKGHQKDDAPTSTGNRRADEVAREVAIRPLSTQATISAGKRTADGSEFEKRTADGSEFESPKKKAKVE

SEQ ID NO: 7613 - protein, 2102 aa, synthetic construct
MPAAKRVKLDGGDKKYSIGLDIGTNSVGWAVITDEYKVPSKKFKVLGNTDRHSIKKNLIGALLFDSGETAEATRLKRTARRRYTRRKNRICYLQEIFSNEMAKVDDSFFHRLEESFLVEEDKKHERHPIFGNIVDEVAYHEKYPTIYHLRKKLVDSTDKADLRLIYLALAHMIKFRGHFLIEGDLNPDNSDVDKLFIQLVQTYNQLFEENPINASGVDAKAILSARLSKSRRLENLIAQLPGEKKNGLFGNLIALSLGLTPNFKSNFDLAEDAKLQLSKDTYDDDLDNLLAQIGDQYADLFLAAKNLSDAILLSDILRVNTEITKAPLSASMIKRYDEHHQDLTLLKALVRQQLPEKYKEIFFDQSKNGYAGYIDGGASQEEFYKFIKPILEKMDGTEELLVKLNREDLLRKQRTFDNGSIPHQIHLGELHAILRRQEDFYPFLKDNREKIEKILTFRIPYYVGPLARGNSRFAWMTRKSEETITPWNFEEVVDKGASAQSFIERMTNFDKNLPNEKVLPKHSLLYEYFTVYNELTKVKYVTEGMRKPAFLSGEQKKAIVDLLFKTNRKVTVKQLKEDYFKKIECFDSVEISGVEDRFNASLGTYHDLLKIIKDKDFLDNEENEDILEDIVLTLTLFEDREMIEERLKTYAHLFDDKVMKQLKRRRYTGWGRLSRKLINGIRDKQSGKTILDFLKSDGFANRNFMQLIHDDSLTFKEDIQKAQVSGQGDSLHEHIANLAGSPAIKKGILQTVKVVDELVKVMGRHKPENIVIEMARENQTTQKGQKNSRERMKRIEEGIKELGSQILKEHPVENTQLQNEKLYLYYLQNGRDMYVDQELDINRLSDYDVDHIVPQSFLKDDSIDNKVLTRSDKARGKSDNVPSEEVVKKMKNYWRQLLNAKLITQRKFDNLTKAERGGLSELDKAGFIKRQLVETRQITKHVAQILDSRMNTKYDENDKLIREVKVITLKSKLVSDFRKDFQFYKVREINNYHHAHDAYLNAVVGTALIKKYPKLESEFVYGDYKVYDVRKMIAKSEQEIGKATAKYFFYSNIMNFFKTEITLANGEIRKRPLIETNGETGEIVWDKGRDFATVRKVLSMPQVNIVKKTEVQTGGFSKESILPKRNSDKLIARKKDWDPKKYGGFDSPTVAYSVLVVAKVEKGKSKKLKSVKELLGITIMERSSFEKNPIDFLEAKGYKEVKKDLIIKLPKYSLFELENGRKRMLASAGELQKGNELALPSKYVNFLYLASHYEKLKGSPEDNEQKQLFVEQHKHYLDEIIEQISEFSKRVILADANLDKVLSAYNKHRDKPIREQAENIIHLFTLTNLGAPAAFKYFDTTIDRKRYTSTKEVLDATLIHQSITGLYETRIDLSQLGGDGGEAAAKPAPGSSGGTVSLQDEHRLFDIPVTTSLPDVWLQDFPQAWAETGGLGRAKCQAPIIIDLKPTAVPVSIKQYPMSLEAHMGIRQHIIKFLELGVLRPCRSPWNTPLLPVKKPGTQDYRPVQDLREINKRTVDIHPTVPNPYNLLSTLKPDYSWYTVLDLKDAFFCLPLAPQSQELFAFEWKDPERGISGQLTWTRLPQGFKNSPTLFNEALHRDLTDFRTQHPEVTLLQYVDDLLLAAPTKKACTQGTRHLLQELGEKGYRASAKKAQICQTKVTYLGYILSEGKRWLTPGRIETVARIPPPRNPREVREFLGTAGFCRLWIPGFAELAAPLYALTKPSTPFTWQTEHQLAFEALKKALLSAPALGLPDTSKPFTLFLDERQGIAKGVLTQKLGPWKRPVAYLSKKLDPVAAGWPPCLRIMAATAMLVKDSAKLTLGQPLTVITPHTLEAIVRQPPDRWITNARLTHYQALLLDTDRVQFGPPVTLNPATLLPVPENQPSPHDCRQVLAETHGTREDLKDQELPDADHTWYTDGSSYLDSGTRRAGAAVVDGHNTIWAQSLPPGTSAQKAELIALTKALELSKGKKANIYTDSRYAFATAHTHGSIYERRGWLTSEGKEIKNKAEIIALLKALFLPQEVAIIHCPGHQKGQDPVAVGNRQADRVARQAAMAEVLTLATEPDNTSHITAGKRTADGSEFEKRTADGSEFESPKKKAKVE

SEQ ID NO: 7614 - protein, 2173 aa, synthetic construct
MPAAKRVKLDGGDKKYSIGLDIGTNSVGWAVITDEYKVPSKKFKVLGNTDRHSIKKNLIGALLFDSGETAEATRLKRTARRRYTRRKNRICYLQEIFSNEMAKVDDSFFHRLEESFLVEEDKKHERHPIFGNIVDEVAYHEKYPTIYHLRKKLVDSTDKADLRLIYLALAHMIKFRGHFLIEGDLNPDNSDVDKLFIQLVQTYNQLFEENPINASGVDAKAILSARLSKSRRLENLIAQLPGEKKNGLFGNLIALSLGLTPNFKSNFDLAEDAKLQLSKDTYDDDLDNLLAQIGDQYADLFLAAKNLSDAILLSDILRVNTEITKAPLSASMIKRYDEHHQDLTLLKALVRQQLPEKYKEIFFDQSKNGYAGYIDGGASQEEFYKFIKPILEKMDGTEELLVKLNREDLLRKQRTFDNGSIPHQIHLGELHAILRRQEDFYPFLKDNREKIEKILTFRIPYYVGPLARGNSRFAWMTRKSEETITPWNFEEVVDKGASAQSFIERMTNFDKNLPNEKVLPKHSLLYEYFTVYNELTKVKYVTEGMRKPAFLSGEQKKAIVDLLFKTNRKVTVKQLKEDYFKKIECFDSVEISGVEDRFNASLGTYHDLLKIIKDKDFLDNEENEDILEDIVLTLTLFEDREMIEERLKTYAHLFDDKVMKQLKRRRYTGWGRLSRKLINGIRDKQSGKTILDFLKSDGFANRNFMQLIHDDSLTFKEDIQKAQVSGQGDSLHEHIANLAGSPAIKKGILQTVKVVDELVKVMGRHKPENIVIEMARENQTTQKGQKNSRERMKRIEEGIKELGSQILKEHPVENTQLQNEKLYLYYLQNGRDMYVDQELDINRLSDYDVDHIVPQSFLKDDSIDNKVLTRSDKARGKSDNVPSEEVVKKMKNYWRQLLNAKLITQRKFDNLTKAERGGLSELDKAGFIKRQLVETRQITKHVAQILDSRMNTKYDENDKLIREVKVITLKSKLVSDFRKDFQFYKVREINNYHHAHDAYLNAVVGTALIKKYPKLESEFVYGDYKVYDVRKMIAKSEQEIGKATAKYFFYSNIMNFFKTEITLANGEIRKRPLIETNGETGEIVWDKGRDFATVRKVLSMPQVNIVKKTEVQTGGFSKESILPKRNSDKLIARKKDWDPKKYGGFDSPTVAYSVLVVAKVEKGKSKKLKSVKELLGITIMERSSFEKNPIDFLEAKGYKEVKKDLIIKLPKYSLFELENGRKRMLASAGELQKGNELALPSKYVNFLYLASHYEKLKGSPEDNEQKQLFVEQHKHYLDEIIEQISEFSKRVILADANLDKVLSAYNKHRDKPIREQAENIIHLFTLTNLGAPAAFKYFDTTIDRKRYTSTKEVLDATLIHQSITGLYETRIDLSQLGGDGGEAAAKPAPGSSGGMDLLKPLTVERKGVKIKGYWNSQADITCVPKDLLQGEEPVRQQNVTTIHGTQEGDVYYVNLKIDGRRINTEVIGTTLDYAIITPGDVPWILKKPLELTIKLDLEEQQGTLLNNSILSKKGKEELKQLFEKYSALWQSWENQVGHRRIRPHKIATGTVKPTPQKQYHINPKAKPDIQIVINDLLKQGVLIQKESTMNTPVYPVPKPNGRWRMVLDYRAVNKVTPLIAVQNQHSYGILGSLFKGRYKTTIDLSNGFWAHPIVPEDYWITAFTWQGKQYCWTVLPQGFLNSPGLFTGDVVDLLQGIPNVEVYVDDVYISHDSEKEHLEYLDILFNRLKEAGYIISLKKSNIANSIVDFLGFQITNEGRGLTDTFKEKLENITAPTTLKQLQSILGLLNFARNFIPDFTELIAPLYALIPKSTKNYVPWQIEHSTTLETLITKLNGAEYLQGRKGDKTLIMKVNASYTTGYIRYYNEGEKKPISYVSIVFSKTELKFTELEKLLTTVHKGLLKALDLSMGQNIHVYSPIVSMQNIQKTPQTAKKALASRWLSWLSYLEDPRIRFFYDPQMPALKDLPAVDTGKDNKKHPSNFQHIFYTDGSAITSPTKEGHLNAGMGIVYFINKDGNLQKQQEWSISLGNHTAQFAEIAAFEFALKKCLPLGGNILVVTDSNYVAKAYNEELDVWASNGFVNNRKKPLKHISKWKSVADLKRLRPDVVVTHEPGHQKLDSSPHAYGNNLADQLATQASFKVHAGKRTADGSEFEKRTADGSEFESPKKKAKVE

SEQ ID NO: 7615 - protein, 2095 aa, synthetic construct
MPAAKRVKLDGGDKKYSIGLDIGTNSVGWAVITDEYKVPSKKFKVLGNTDRHSIKKNLIGALLFDSGETAEATRLKRTARRRYTRRKNRICYLQEIFSNEMAKVDDSFFHRLEESFLVEEDKKHERHPIFGNIVDEVAYHEKYPTIYHLRKKLVDSTDKADLRLIYLALAHMIKFRGHFLIEGDLNPDNSDVDKLFIQLVQTYNQLFEENPINASGVDAKAILSARLSKSRRLENLIAQLPGEKKNGLFGNLIALSLGLTPNFKSNFDLAEDAKLQLSKDTYDDDLDNLLAQIGDQYADLFLAAKNLSDAILLSDILRVNTEITKAPLSASMIKRYDEHHQDLTLLKALVRQQLPEKYKEIFFDQSKNGYAGYIDGGASQEEFYKFIKPILEKMDGTEELLVKLNREDLLRKQRTFDNGSIPHQIHLGELHAILRRQEDFYPFLKDNREKIEKILTFRIPYYVGPLARGNSRFAWMTRKSEETITPWNFEEVVDKGASAQSFIERMTNFDKNLPNEKVLPKHSLLYEYFTVYNELTKVKYVTEGMRKPAFLSGEQKKAIVDLLFKTNRKVTVKQLKEDYFKKIECFDSVEISGVEDRFNASLGTYHDLLKIIKDKDFLDNEENEDILEDIVLTLTLFEDREMIEERLKTYAHLFDDKVMKQLKRRRYTGWGRLSRKLINGIRDKQSGKTILDFLKSDGFANRNFMQLIHDDSLTFKEDIQKAQVSGQGDSLHEHIANLAGSPAIKKGILQTVKVVDELVKVMGRHKPENIVIEMARENQTTQKGQKNSRERMKRIEEGIKELGSQILKEHPVENTQLQNEKLYLYYLQNGRDMYVDQELDINRLSDYDVDHIVPQSFLKDDSIDNKVLTRSDKARGKSDNVPSEEVVKKMKNYWRQLLNAKLITQRKFDNLTKAERGGLSELDKAGFIKRQLVETRQITKHVAQILDSRMNTKYDENDKLIREVKVITLKSKLVSDFRKDFQFYKVREINNYHHAHDAYLNAVVGTALIKKYPKLESEFVYGDYKVYDVRKMIAKSEQEIGKATAKYFFYSNIMNFFKTEITLANGEIRKRPLIETNGETGEIVWDKGRDFATVRKVLSMPQVNIVKKTEVQTGGFSKESILPKRNSDKLIARKKDWDPKKYGGFDSPTVAYSVLVVAKVEKGKSKKLKSVKELLGITIMERSSFEKNPIDFLEAKGYKEVKKDLIIKLPKYSLFELENGRKRMLASAGELQKGNELALPSKYVNFLYLASHYEKLKGSPEDNEQKQLFVEQHKHYLDEIIEQISEFSKRVILADANLDKVLSAYNKHRDKPIREQAENIIHLFTLTNLGAPAAFKYFDTTIDRKRYTSTKEVLDATLIHQSITGLYETRIDLSQLGGDGGEAAAKPAPGSSGGTLQLEEEYRLFEPESTQKQEMDIWLKNFPQAWAETGGMGTAHCQAPVLIQLKATATPISIRQYPMPHEAYQGIKPHIRRMLDQGILKPCQSPWNTPLLPVKKPGTEDYRPVQDLREVNKRVEDIHPTVPNPYNLLSTLPPSHPWYTVLDLKDAFFCLRLHSESQLLFAFEWRDPEIGLSGQLTWTRLPQGFKNSPTLFNEALHSDLADFRVRYPALVLLQYVDDLLLAAATRTECLEGTKALLETLGNKGYRASAKKAQICLQEVTYLGYSLKDGQRWLTKARKEAILSIPVPKNSRQVREFLGKAGYCRLFIPGFAELAAPLYPLTRPGTLFQWGTEQQLAFEDIKKALLSSPALGLPDITKPFELFIDENSGFAKGVLVQKLGPWKRPVAYLSKKLDTVASGWPPCLRMVAAIAILVKDAGKLTLGQPLTILTSHPVEALVRQPPNKWLSNARMTHYQAMLLDAERVHFGPTVSLNPATLLPLPSGGNHHDCLQILAETHGTRPDLTDQPLPDADLTWYTDGSSFIRNGEREAGAAVTTESEVIWAAPLPPGTSAQRAELIALTQALKMAEGKKLTVYTDSRYAFATTHVHGEIYRRRGWLTSEGKEIKNKNEILALLEALFLPKRLSIIHCPGHQKGDSPQAKGNRLADDTAKKAATETHSSLTVLPAGKRTADGSEFEKRTADGSEFESPKKKAKVE

SEQ ID NO: 7616 - protein, 2087 aa, synthetic construct
MPAAKRVKLDGGDKKYSIGLDIGTNSVGWAVITDEYKVPSKKFKVLGNTDRHSIKKNLIGALLFDSGETAEATRLKRTARRRYTRRKNRICYLQEIFSNEMAKVDDSFFHRLEESFLVEEDKKHERHPIFGNIVDEVAYHEKYPTIYHLRKKLVDSTDKADLRLIYLALAHMIKFRGHFLIEGDLNPDNSDVDKLFIQLVQTYNQLFEENPINASGVDAKAILSARLSKSRRLENLIAQLPGEKKNGLFGNLIALSLGLTPNFKSNFDLAEDAKLQLSKDTYDDDLDNLLAQIGDQYADLFLAAKNLSDAILLSDILRVNTEITKAPLSASMIKRYDEHHQDLTLLKALVRQQLPEKYKEIFFDQSKNGYAGYIDGGASQEEFYKFIKPILEKMDGTEELLVKLNREDLLRKQRTFDNGSIPHQIHLGELHAILRRQEDFYPFLKDNREKIEKILTFRIPYYVGPLARGNSRFAWMTRKSEETITPWNFEEVVDKGASAQSFIERMTNFDKNLPNEKVLPKHSLLYEYFTVYNELTKVKYVTEGMRKPAFLSGEQKKAIVDLLFKTNRKVTVKQLKEDYFKKIECFDSVEISGVEDRFNASLGTYHDLLKIIKDKDFLDNEENEDILEDIVLTLTLFEDREMIEERLKTYAHLFDDKVMKQLKRRRYTGWGRLSRKLINGIRDKQSGKTILDFLKSDGFANRNFMQLIHDDSLTFKEDIQKAQVSGQGDSLHEHIANLAGSPAIKKGILQTVKVVDELVKVMGRHKPENIVIEMARENQTTQKGQKNSRERMKRIEEGIKELGSQILKEHPVENTQLQNEKLYLYYLQNGRDMYVDQELDINRLSDYDVDHIVPQSFLKDDSIDNKVLTRSDKARGKSDNVPSEEVVKKMKNYWRQLLNAKLITQRKFDNLTKAERGGLSELDKAGFIKRQLVETRQITKHVAQILDSRMNTKYDENDKLIREVKVITLKSKLVSDFRKDFQFYKVREINNYHHAHDAYLNAVVGTALIKKYPKLESEFVYGDYKVYDVRKMIAKSEQEIGKATAKYFFYSNIMNFFKTEITLANGEIRKRPLIETNGETGEIVWDKGRDFATVRKVLSMPQVNIVKKTEVQTGGFSKESILPKRNSDKLIARKKDWDPKKYGGFDSPTVAYSVLVVAKVEKGKSKKLKSVKELLGITIMERSSFEKNPIDFLEAKGYKEVKKDLIIKLPKYSLFELENGRKRMLASAGELQKGNELALPSKYVNFLYLASHYEKLKGSPEDNEQKQLFVEQHKHYLDEIIEQISEFSKRVILADANLDKVLSAYNKHRDKPIREQAENIIHLFTLTNLGAPAAFKYFDTTIDRKRYTSTKEVLDATLIHQSITGLYETRIDLSQLGGDGGEAAAKPAPGSSGGVPWLTQQPLQLTILVPLQEYQEKILSKTALPEDQKQQLKTLFVKYDNLWQHWENQVGHRKIRPHNIATGDYPPRPQKQYPINPKAKPSIQIVIDDLLKQGVLTPQNSTMNTPVYPVPKPDGRWRMVLDYREVNKTIPLTAAQNQHSAGILATIVRQKYKTTLDLANGFWAHPITPESYWLTAFTWQGKQYCWTRLPQGFLNSPALFNADVVDLLKEIPNVQVYVDDIYLSHDDPKEHVQQLEKVFQILLQAGYVVSLKKSEIGQKTVEFLGFNITKEGRGLTDTFKTKLLNITPPKDLKQLQSILGKLNFARNFIPNFAELVQPLYNLIAPAKGKYIEWSEENTKQLNMVIEALNTASNLEERLPEQRLVIKVNTSPSAGYVRYYNETGKKPIMYLNYVFSKAELKFSMLEKLLTTMHKALIKAMDLAMGQEILVYSPIVSMTKIQKTPLPERKALPIRWITWMTYLEDPRIQFHYDKTLPELKHIPDVYTSSQSPVKHPSQYEGVFYTDGSAIKSPDPTKSNNAGMGIVHATYKPEYQVLNQWSIPLGNHTAQMAEIAAVEFACKKALKIPGPVLVITDSFYVAESANKELPYWKSNGFVNNKKKPLKHISKWKSIAECLSMKPDITIQHEKGISLQIPVFILKGNALADKLATQGSYVVNAGKRTADGSEFEKRTADGSEFESPKKKAKVE

SEQ ID NO: 7617 - protein, 2094 aa, synthetic construct
MPAAKRVKLDGGDKKYSIGLDIGTNSVGWAVITDEYKVPSKKFKVLGNTDRHSIKKNLIGALLFDSGETAEATRLKRTARRRYTRRKNRICYLQEIFSNEMAKVDDSFFHRLEESFLVEEDKKHERHPIFGNIVDEVAYHEKYPTIYHLRKKLVDSTDKADLRLIYLALAHMIKFRGHFLIEGDLNPDNSDVDKLFIQLVQTYNQLFEENPINASGVDAKAILSARLSKSRRLENLIAQLPGEKKNGLFGNLIALSLGLTPNFKSNFDLAEDAKLQLSKDTYDDDLDNLLAQIGDQYADLFLAAKNLSDAILLSDILRVNTEITKAPLSASMIKRYDEHHQDLTLLKALVRQQLPEKYKEIFFDQSKNGYAGYIDGGASQEEFYKFIKPILEKMDGTEELLVKLNREDLLRKQRTFDNGSIPHQIHLGELHAILRRQEDFYPFLKDNREKIEKILTFRIPYYVGPLARGNSRFAWMTRKSEETITPWNFEEVVDKGASAQSFIERMTNFDKNLPNEKVLPKHSLLYEYFTVYNELTKVKYVTEGMRKPAFLSGEQKKAIVDLLFKTNRKVTVKQLKEDYFKKIECFDSVEISGVEDRFNASLGTYHDLLKIIKDKDFLDNEENEDILEDIVLTLTLFEDREMIEERLKTYAHLFDDKVMKQLKRRRYTGWGRLSRKLINGIRDKQSGKTILDFLKSDGFANRNFMQLIHDDSLTFKEDIQKAQVSGQGDSLHEHIANLAGSPAIKKGILQTVKVVDELVKVMGRHKPENIVIEMARENQTTQKGQKNSRERMKRIEEGIKELGSQILKEHPVENTQLQNEKLYLYYLQNGRDMYVDQELDINRLSDYDVDHIVPQSFLKDDSIDNKVLTRSDKARGKSDNVPSEEVVKKMKNYWRQLLNAKLITQRKFDNLTKAERGGLSELDKAGFIKRQLVETRQITKHVAQILDSRMNTKYDENDKLIREVKVITLKSKLVSDFRKDFQFYKVREINNYHHAHDAYLNAVVGTALIKKYPKLESEFVYGDYKVYDVRKMIAKSEQEIGKATAKYFFYSNIMNFFKTEITLANGEIRKRPLIETNGETGEIVWDKGRDFATVRKVLSMPQVNIVKKTEVQTGGFSKESILPKRNSDKLIARKKDWDPKKYGGFDSPTVAYSVLVVAKVEKGKSKKLKSVKELLGITIMERSSFEKNPIDFLEAKGYKEVKKDLIIKLPKYSLFELENGRKRMLASAGELQKGNELALPSKYVNFLYLASHYEKLKGSPEDNEQKQLFVEQHKHYLDEIIEQISEFSKRVILADANLDKVLSAYNKHRDKPIREQAENIIHLFTLTNLGAPAAFKYFDTTIDRKRYTSTKEVLDATLIHQSITGLYETRIDLSQLGGDGGEAAAKPAPGSSGGVLNLEEEYRLHEKPVPSSIDPSWLQLFPTVWAERAGMGLANQVPPVVVELRSGASPVAVRQYPMSKEAREGIRPHIQKFLDLGVLVPCRSPWNTPLLPVKKPGTNDYRPVQDLREINKRVQDIHPTVPNPYNLLSSLPPSYTWYSVLDLKDAFFCLRLHPNSQPLFAFEWKDPEKGNTGQLTWTRLPQGFKNSPTLFNEALHRDLAPFRALNPQVVLLQYVDDLLVAAPTYEDCKKGTQKLLQELSKLGYRVSAKKAQLCQREVTYLGYLLKEGKRWLTPARKATVMKIPVPTTPRQVREFLGTAGFCRLWIPGFASLAAPLYPLTKPSIPFIWTEEHQQAFDHIKKALLSAPALALPDLTKPFTLYIDERAGVARGVLTQTLGPWRRPVAYLSKKLDPVASGWPTCLKAVAAVALLLKDADKLTLGQNVTVIASHSLESIVRQPPDRWMTNARMTHYQSLLLNERVSFAPPAVLNPATLLPVESEATPVHRCSEILAEETGTRRDLEDQPLPGVPTWYTDGSSFITEGKRRAGAPIVDGKRTVWASSLPEGTSAQKAELVALTQALRLAEGKNINIYTDSRYAFATAHIHGAIYKQRGWLTSAGKDIKNKEEILALLEAIHLPRRVAIIHCPGHQRGSNPVATGNRRADEAAKQAALSTRVLAGTTKPAGKRTADGSEFEKRTADGSEFESPKKKAKVE

SEQ ID NO: 7618 - protein, 2094 aa, synthetic construct
MPAAKRVKLDGGDKKYSIGLDIGTNSVGWAVITDEYKVPSKKFKVLGNTDRHSIKKNLIGALLFDSGETAEATRLKRTARRRYTRRKNRICYLQEIFSNEMAKVDDSFFHRLEESFLVEEDKKHERHPIFGNIVDEVAYHEKYPTIYHLRKKLVDSTDKADLRLIYLALAHMIKFRGHFLIEGDLNPDNSDVDKLFIQLVQTYNQLFEENPINASGVDAKAILSARLSKSRRLENLIAQLPGEKKNGLFGNLIALSLGLTPNFKSNFDLAEDAKLQLSKDTYDDDLDNLLAQIGDQYADLFLAAKNLSDAILLSDILRVNTEITKAPLSASMIKRYDEHHQDLTLLKALVRQQLPEKYKEIFFDQSKNGYAGYIDGGASQEEFYKFIKPILEKMDGTEELLVKLNREDLLRKQRTFDNGSIPHQIHLGELHAILRRQEDFYPFLKDNREKIEKILTFRIPYYVGPLARGNSRFAWMTRKSEETITPWNFEEVVDKGASAQSFIERMTNFDKNLPNEKVLPKHSLLYEYFTVYNELTKVKYVTEGMRKPAFLSGEQKKAIVDLLFKTNRKVTVKQLKEDYFKKIECFDSVEISGVEDRFNASLGTYHDLLKIIKDKDFLDNEENEDILEDIVLTLTLFEDREMIEERLKTYAHLFDDKVMKQLKRRRYTGWGRLSRKLINGIRDKQSGKTILDFLKSDGFANRNFMQLIHDDSLTFKEDIQKAQVSGQGDSLHEHIANLAGSPAIKKGILQTVKVVDELVKVMGRHKPENIVIEMARENQTTQKGQKNSRERMKRIEEGIKELGSQILKEHPVENTQLQNEKLYLYYLQNGRDMYVDQELDINRLSDYDVDHIVPQSFLKDDSIDNKVLTRSDKARGKSDNVPSEEVVKKMKNYWRQLLNAKLITQRKFDNLTKAERGGLSELDKAGFIKRQLVETRQITKHVAQILDSRMNTKYDENDKLIREVKVITLKSKLVSDFRKDFQFYKVREINNYHHAHDAYLNAVVGTALIKKYPKLESEFVYGDYKVYDVRKMIAKSEQEIGKATAKYFFYSNIMNFFKTEITLANGEIRKRPLIETNGETGEIVWDKGRDFATVRKVLSMPQVNIVKKTEVQTGGFSKESILPKRNSDKLIARKKDWDPKKYGGFDSPTVAYSVLVVAKVEKGKSKKLKSVKELLGITIMERSSFEKNPIDFLEAKGYKEVKKDLIIKLPKYSLFELENGRKRMLASAGELQKGNELALPSKYVNFLYLASHYEKLKGSPEDNEQKQLFVEQHKHYLDEIIEQISEFSKRVILADANLDKVLSAYNKHRDKPIREQAENIIHLFTLTNLGAPAAFKYFDTTIDRKRYTSTKEVLDATLIHQSITGLYETRIDLSQLGGDGGEAAAKPAPGSSGGVLNLEEEYRLHEKPVPSSIDPSWLQLFPTVWAERAGMGLANQVPPVVVELRSGASPVAVRQYPMSKEAREGIRPHIQKFLDLGVLVPCRSPWNTPLLPVKKPGTNDYRPVQDLREINKRVQDIHPTVPNPYNLLSSLPPSYTWYSVLDLKDAFFCLRLHPNSQPLFAFEWKDPEKGNTGQLTWTRLPQGFKNSPTLFNEALHRDLAPFRALNPQVVLLQYVDDLLVAAPTYEDCKKGTQKLLQELSKLGYRVSAKKAQLCQREVTYLGYLLKEGKRWLTPARKATVMKIPVPTTPRQVREFLGKAGFCRLFIPGFASLAAPLYPLTKPSIPFIWTEEHQQAFDHIKKALLSAPALALPDLTKPFTLYIDERAGVARGVLTQTLGPWRRPVAYLSKKLDPVASGWPTCLKAVAAVALLLKDADKLTLGQNVTVIASHSLESIVRQPPDRWMTNARMTHYQSLLLNERVSFAPPAVLNPATLLPVESEATPVHRCSEILAEETGTRRDLEDQPLPGVPTWYTDGSSFITEGKRRAGAPIVDGKRTVWASSLPEGTSAQKAELVALTQALRLAEGKNINIYTDSRYAFATAHIHGAIYKQRGWLTSAGKDIKNKEEILALLEAIHLPRRVAIIHCPGHQRGSNPVATGNRRADEAAKQAALSTRVLAGTTKPAGKRTADGSEFEKRTADGSEFESPKKKAKVE

SEQ ID NO: 7619 - protein, 2218 aa, synthetic construct
MPAAKRVKLDGGDKKYSIGLDIGTNSVGWAVITDEYKVPSKKFKVLGNTDRHSIKKNLIGALLFDSGETAEATRLKRTARRRYTRRKNRICYLQEIFSNEMAKVDDSFFHRLEESFLVEEDKKHERHPIFGNIVDEVAYHEKYPTIYHLRKKLVDSTDKADLRLIYLALAHMIKFRGHFLIEGDLNPDNSDVDKLFIQLVQTYNQLFEENPINASGVDAKAILSARLSKSRRLENLIAQLPGEKKNGLFGNLIALSLGLTPNFKSNFDLAEDAKLQLSKDTYDDDLDNLLAQIGDQYADLFLAAKNLSDAILLSDILRVNTEITKAPLSASMIKRYDEHHQDLTLLKALVRQQLPEKYKEIFFDQSKNGYAGYIDGGASQEEFYKFIKPILEKMDGTEELLVKLNREDLLRKQRTFDNGSIPHQIHLGELHAILRRQEDFYPFLKDNREKIEKILTFRIPYYVGPLARGNSRFAWMTRKSEETITPWNFEEVVDKGASAQSFIERMTNFDKNLPNEKVLPKHSLLYEYFTVYNELTKVKYVTEGMRKPAFLSGEQKKAIVDLLFKTNRKVTVKQLKEDYFKKIECFDSVEISGVEDRFNASLGTYHDLLKIIKDKDFLDNEENEDILEDIVLTLTLFEDREMIEERLKTYAHLFDDKVMKQLKRRRYTGWGRLSRKLINGIRDKQSGKTILDFLKSDGFANRNFMQLIHDDSLTFKEDIQKAQVSGQGDSLHEHIANLAGSPAIKKGILQTVKVVDELVKVMGRHKPENIVIEMARENQTTQKGQKNSRERMKRIEEGIKELGSQILKEHPVENTQLQNEKLYLYYLQNGRDMYVDQELDINRLSDYDVDHIVPQSFLKDDSIDNKVLTRSDKARGKSDNVPSEEVVKKMKNYWRQLLNAKLITQRKFDNLTKAERGGLSELDKAGFIKRQLVETRQITKHVAQILDSRMNTKYDENDKLIREVKVITLKSKLVSDFRKDFQFYKVREINNYHHAHDAYLNAVVGTALIKKYPKLESEFVYGDYKVYDVRKMIAKSEQEIGKATAKYFFYSNIMNFFKTEITLANGEIRKRPLIETNGETGEIVWDKGRDFATVRKVLSMPQVNIVKKTEVQTGGFSKESILPKRNSDKLIARKKDWDPKKYGGFDSPTVAYSVLVVAKVEKGKSKKLKSVKELLGITIMERSSFEKNPIDFLEAKGYKEVKKDLIIKLPKYSLFELENGRKRMLASAGELQKGNELALPSKYVNFLYLASHYEKLKGSPEDNEQKQLFVEQHKHYLDEIIEQISEFSKRVILADANLDKVLSAYNKHRDKPIREQAENIIHLFTLTNLGAPAAFKYFDTTIDRKRYTSTKEVLDATLIHQSITGLYETRIDLSQLGGDGGEAAAKPAPGSSGGTLGDQGSRGSDPLPEPRVTLTVEGIPTEFLVNTGAEHSVLTKPMGKMGSKRTVVAGATGSKVYPWTTKRLLKIGQKQVTHSFLVIPECPAPLLGRDLLTKLKAQIQFSTEGPQVTWEDRPAMCLVLNLEEEYRLHEKPVPPSIDPSWLQLFPMVWAEKAGMGLANQVPPVVVELKSDASPVAVRQYPMSKEAREGIRPHIQRFLDLGILVPCQSPWNTPLLPVKKPGTNDYRPVQDLREVNKRVQDIHPTVPNPYNLLSSLPPSHTWYSVLDLKDAFFCLKLHPNSQPLFAFEWRDPEKGNTGQLTWTRLPQGFKNSPTLFDEALHRDLASFRALNPQVVMLQYVDDLLVAAPTYRDCKEGTRRLLQELSKLGYRVSAKKAQLCREEVTYLGYLLKGGKRWLTPARKATVMKIPTPTTPRQVREFLGTAGFCRLWIPGFASLAAPLYPLTREKVPFTWTEAHQEAFGRIKEALLSAPALALPDLTKPFALYVDEKEGVARGVLTQTLGPWRRPVAYLSKKLDPVASGWPTCLKAIAAVALLLKDADKLTLGQNVLVIAPHNLESIVRQPPDRWMTNARMTHYQSLLLNERVSFAPPAILNPATLLPVESDDTPIHICSEILAEETGTRPDLRDQPLPGVPAWYTDGSSFIMDGRRQAGAAIVDNKRTVWASNLPEGTSAQKAELIALTQALRLAEGKSINIYTDSRYAFATAHVHGAIYKQRGLLTSAGKDIKNKEEILALLEAIHLPKRVAIIHCPGHQRGTDPVATGNRKADEAAKQAAQSTRILTETTKNAGKRTADGSEFEKRTADGSEFESPKKKAKVE

SEQ ID NO: 7620 - protein, 2218 aa, synthetic construct
MPAAKRVKLDGGDKKYSIGLDIGTNSVGWAVITDEYKVPSKKFKVLGNTDRHSIKKNLIGALLFDSGETAEATRLKRTARRRYTRRKNRICYLQEIFSNEMAKVDDSFFHRLEESFLVEEDKKHERHPIFGNIVDEVAYHEKYPTIYHLRKKLVDSTDKADLRLIYLALAHMIKFRGHFLIEGDLNPDNSDVDKLFIQLVQTYNQLFEENPINASGVDAKAILSARLSKSRRLENLIAQLPGEKKNGLFGNLIALSLGLTPNFKSNFDLAEDAKLQLSKDTYDDDLDNLLAQIGDQYADLFLAAKNLSDAILLSDILRVNTEITKAPLSASMIKRYDEHHQDLTLLKALVRQQLPEKYKEIFFDQSKNGYAGYIDGGASQEEFYKFIKPILEKMDGTEELLVKLNREDLLRKQRTFDNGSIPHQIHLGELHAILRRQEDFYPFLKDNREKIEKILTFRIPYYVGPLARGNSRFAWMTRKSEETITPWNFEEVVDKGASAQSFIERMTNFDKNLPNEKVLPKHSLLYEYFTVYNELTKVKYVTEGMRKPAFLSGEQKKAIVDLLFKTNRKVTVKQLKEDYFKKIECFDSVEISGVEDRFNASLGTYHDLLKIIKDKDFLDNEENEDILEDIVLTLTLFEDREMIEERLKTYAHLFDDKVMKQLKRRRYTGWGRLSRKLINGIRDKQSGKTILDFLKSDGFANRNFMQLIHDDSLTFKEDIQKAQVSGQGDSLHEHIANLAGSPAIKKGILQTVKVVDELVKVMGRHKPENIVIEMARENQTTQKGQKNSRERMKRIEEGIKELGSQILKEHPVENTQLQNEKLYLYYLQNGRDMYVDQELDINRLSDYDVDHIVPQSFLKDDSIDNKVLTRSDKARGKSDNVPSEEVVKKMKNYWRQLLNAKLITQRKFDNLTKAERGGLSELDKAGFIKRQLVETRQITKHVAQILDSRMNTKYDENDKLIREVKVITLKSKLVSDFRKDFQFYKVREINNYHHAHDAYLNAVVGTALIKKYPKLESEFVYGDYKVYDVRKMIAKSEQEIGKATAKYFFYSNIMNFFKTEITLANGEIRKRPLIETNGETGEIVWDKGRDFATVRKVLSMPQVNIVKKTEVQTGGFSKESILPKRNSDKLIARKKDWDPKKYGGFDSPTVAYSVLVVAKVEKGKSKKLKSVKELLGITIMERSSFEKNPIDFLEAKGYKEVKKDLIIKLPKYSLFELENGRKRMLASAGELQKGNELALPSKYVNFLYLASHYEKLKGSPEDNEQKQLFVEQHKHYLDEIIEQISEFSKRVILADANLDKVLSAYNKHRDKPIREQAENIIHLFTLTNLGAPAAFKYFDTTIDRKRYTSTKEVLDATLIHQSITGLYETRIDLSQLGGDGGEAAAKPAPGSSGGTLGDQGSRGSDPLPEPRVTLTVEGIPTEFLVNTGAEHSVLTKPMGKMGSKRTVVAGATGSKVYPWTTKRLLKIGQKQVTHSFLVIPECPAPLLGRDLLTKLKAQIQFSTEGPQVTWEDRPAMCLVLNLEEEYRLHEKPVPPSIDPSWLQLFPMVWAEKAGMGLANQVPPVVVELKSDASPVAVRQYPMSKEAREGIRPHIQRFLDLGILVPCQSPWNTPLLPVKKPGTNDYRPVQDLREVNKRVQDIHPTVPNPYNLLSSLPPSHTWYSVLDLKDAFFCLKLHPNSQPLFAFEWRDPEKGNTGQLTWTRLPQGFKNSPTLFNEALHRDLASFRALNPQVVMLQYVDDLLVAAPTYRDCKEGTRRLLQELSKLGYRVSAKKAQLCREEVTYLGYLLKGGKRWLTPARKATVMKIPTPTTPRQVREFLGTAGFCRLWIPGFASLAAPLYPLTRPKVPFTWTEAHQEAFGRIKEALLSAPALALPDLTKPFALYVDEKEGVARGVLTQTLGPWRRPVAYLSKKLDPVASGWPTCLKAIAAVALLLKDADKLTLGQNVLVIAPHNLESIVRQPPDRWMTNARMTHYQSLLLNERVSFAPPAILNPATLLPVESDDTPIHICSEILAEETGTRPDLRDQPLPGVPAWYTDGSSFIMDGRRQAGAAIVDNKRTVWASNLPEGTSAQKAELIALTQALRLAEGKSINIYTDSRYAFATAHVHGAIYKQRGWLTSAGKDIKNKEEILALLEAIHLPKRVAIIHCPGHQRGTDPVATGNRKADEAAKQAAQSTRILTETTKNAGKRTADGSEFEKRTADGSEFESPKKKAKVE

SEQ ID NO: 7621 - protein, 2096 aa, synthetic construct
MPAAKRVKLDGGDKKYSIGLDIGTNSVGWAVITDEYKVPSKKFKVLGNTDRHSIKKNLIGALLFDSGETAEATRLKRTARRRYTRRKNRICYLQEIFSNEMAKVDDSFFHRLEESFLVEEDKKHERHPIFGNIVDEVAYHEKYPTIYHLRKKLVDSTDKADLRLIYLALAHMIKFRGHFLIEGDLNPDNSDVDKLFIQLVQTYNQLFEENPINASGVDAKAILSARLSKSRRLENLIAQLPGEKKNGLFGNLIALSLGLTPNFKSNFDLAEDAKLQLSKDTYDDDLDNLLAQIGDQYADLFLAAKNLSDAILLSDILRVNTEITKAPLSASMIKRYDEHHQDLTLLKALVRQQLPEKYKEIFFDQSKNGYAGYIDGGASQEEFYKFIKPILEKMDGTEELLVKLNREDLLRKQRTFDNGSIPHQIHLGELHAILRRQEDFYPFLKDNREKIEKILTFRIPYYVGPLARGNSRFAWMTRKSEETITPWNFEEVVDKGASAQSFIERMTNFDKNLPNEKVLPKHSLLYEYFTVYNELTKVKYVTEGMRKPAFLSGEQKKAIVDLLFKTNRKVTVKQLKEDYFKKIECFDSVEISGVEDRFNASLGTYHDLLKIIKDKDFLDNEENEDILEDIVLTLTLFEDREMIEERLKTYAHLFDDKVMKQLKRRRYTGWGRLSRKLINGIRDKQSGKTILDFLKSDGFANRNFMQLIHDDSLTFKEDIQKAQVSGQGDSLHEHIANLAGSPAIKKGILQTVKVVDELVKVMGRHKPENIVIEMARENQTTQKGQKNSRERMKRIEEGIKELGSQILKEHPVENTQLQNEKLYLYYLQNGRDMYVDQELDINRLSDYDVDHIVPQSFLKDDSIDNKVLTRSDKARGKSDNVPSEEVVKKMKNYWRQLLNAKLITQRKFDNLTKAERGGLSELDKAGFIKRQLVETRQITKHVAQILDSRMNTKYDENDKLIREVKVITLKSKLVSDFRKDFQFYKVREINNYHHAHDAYLNAVVGTALIKKYPKLESEFVYGDYKVYDVRKMIAKSEQEIGKATAKYFFYSNIMNFFKTEITLANGEIRKRPLIETNGETGEIVWDKGRDFATVRKVLSMPQVNIVKKTEVQTGGFSKESILPKRNSDKLIARKKDWDPKKYGGFDSPTVAYSVLVVAKVEKGKSKKLKSVKELLGITIMERSSFEKNPIDFLEAKGYKEVKKDLIIKLPKYSLFELENGRKRMLASAGELQKGNELALPSKYVNFLYLASHYEKLKGSPEDNEQKQLFVEQHKHYLDEIIEQISEFSKRVILADANLDKVLSAYNKHRDKPIREQAENIIHLFTLTNLGAPAAFKYFDTTIDRKRYTSTKEVLDATLIHQSITGLYETRIDLSQLGGDGGEAAAKPAPGSSGGTLNLEDEYRLYETSAEPEVSPGSTWLSDFPQAWAETGGMGLAVRQAPLIIPLKATSTPVSIKQYPMSQEAKLGIKPHIQRLLDQGILVPCQSPWNTPLLPVKKPGTNDYRPVQDLREVNKRVEDIHPTVPNPYNLLSGLPPSHRWYTVLDLKDAFFCLRLHPTSQPLFAFEWRDPGMGISGQLTWTRLPQGFKNSPTLFNEALHRDLADFRIQHPDLILLQYVDDILLAATSELDCQQGTRALLLTLGNLGYRASAKKAQLCQKQVKYLGYLLKEGQRWLTEARKETVMGQPTPKTPRQLREFLGKAGFCRLFIPGFAEMAAPLYPLTKPGTLFNWGPDQQKAYQEIKQALLTAPALGLPDLTKPFELFVDEKQGYAKGVLTQKLGPWRRPVAYLSKKLDPVAAGWPPCLRMVAAIAVLRKDAGKLTMGQPLVILAPHAVEALVKQPPDRWLSNARMTHYQAMLLDTDRVQFGPVVALNPATLLPLPEEGAPHDCLEILAETHGTRPDLTDQPIPDADHTWYTDGSSFLQEGQRKAGAAVTTETEVIWARALPAGTSAQRAELIALTQALKMAEGKRLNVYTDSRYAFATAHIHGEIYRRRGWLTSEGREIKNKSEILALLKALFLPKRLSIIHCLGHQKGDSAEARGNRLADQAAREAAIKTPPDTSTLLAGKRTADGSEFEKRTADGSEFESPKKKAKVE

SEQ ID NO: 7622 - protein, 2096 aa, synthetic construct
MPAAKRVKLDGGDKKYSIGLDIGTNSVGWAVITDEYKVPSKKFKVLGNTDRHSIKKNLIGALLFDSGETAEATRLKRTARRRYTRRKNRICYLQEIFSNEMAKVDDSFFHRLEESFLVEEDKKHERHPIFGNIVDEVAYHEKYPTIYHLRKKLVDSTDKADLRLIYLALAHMIKFRGHFLIEGDLNPDNSDVDKLFIQLVQTYNQLFEENPINASGVDAKAILSARLSKSRRLENLIAQLPGEKKNGLFGNLIALSLGLTPNFKSNFDLAEDAKLQLSKDTYDDDLDNLLAQIGDQYADLFLAAKNLSDAILLSDILRVNTEITKAPLSASMIKRYDEHHQDLTLLKALVRQQLPEKYKEIFFDQSKNGYAGYIDGGASQEEFYKFIKPILEKMDGTEELLVKLNREDLLRKQRTFDNGSIPHQIHLGELHAILRRQEDFYPFLKDNREKIEKILTFRIPYYVGPLARGNSRFAWMTRKSEETITPWNFEEVVDKGASAQSFIERMTNFDKNLPNEKVLPKHSLLYEYFTVYNELTKVKYVTEGMRKPAFLSGEQKKAIVDLLFKTNRKVTVKQLKEDYFKKIECFDSVEISGVEDRFNASLGTYHDLLKIIKDKDFLDNEENEDILEDIVLTLTLFEDREMIEERLKTYAHLFDDKVMKQLKRRRYTGWGRLSRKLINGIRDKQSGKTILDFLKSDGFANRNFMQLIHDDSLTFKEDIQKAQVSGQGDSLHEHIANLAGSPAIKKGILQTVKVVDELVKVMGRHKPENIVIEMARENQTTQKGQKNSRERMKRIEEGIKELGSQILKEHPVENTQLQNEKLYLYYLQNGRDMYVDQELDINRLSDYDVDHIVPQSFLKDDSIDNKVLTRSDKARGKSDNVPSEEVVKKMKNYWRQLLNAKLITQRKFDNLTKAERGGLSELDKAGFIKRQLVETRQITKHVAQILDSRMNTKYDENDKLIREVKVITLKSKLVSDFRKDFQFYKVREINNYHHAHDAYLNAVVGTALIKKYPKLESEFVYGDYKVYDVRKMIAKSEQEIGKATAKYFFYSNIMNFFKTEITLANGEIRKRPLIETNGETGEIVWDKGRDFATVRKVLSMPQVNIVKKTEVQTGGFSKESILPKRNSDKLIARKKDWDPKKYGGFDSPTVAYSVLVVAKVEKGKSKKLKSVKELLGITIMERSSFEKNPIDFLEAKGYKEVKKDLIIKLPKYSLFELENGRKRMLASAGELQKGNELALPSKYVNFLYLASHYEKLKGSPEDNEQKQLFVEQHKHYLDEIIEQISEFSKRVILADANLDKVLSAYNKHRDKPIREQAENIIHLFTLTNLGAPAAFKYFDTTIDRKRYTSTKEVLDATLIHQSITGLYETRIDLSQLGGDGGEAAAKPAPGSSGGTLNIEDEYRLHETSKGPDVPLGSTWLSDFPQAWAETGGMGLAFRQAPLIISLKATSTPVSIKQYPMSQEARLGIKPHIQRLLDQGILVPCQSPWNTPLLPVKKPGTNDYRPVQDLREVNKRVEDIHPTVPNPYNLLSGLPPSHQWYTVLDLKDAFFCLRLHPTSQSLFAFEWKDPEMGISGQLTWTRLPQGFKNSPTLFNEALHRDLADFRIQHPDLILLQYVDDLLLAATSELDCQQGTRALLQTLGDLGYRASAKKAQICQKQVKYLGYLLKEGQRWLTEARKETVMGQPTPKTPRQLREFLGKAGLCRLFIPGFAEMAAPLYPLTKPGTLFKWGPDQQKAYQEIKQALLTAPALGLPDLTKPFELFVDEKQGYAKGVLTQKLGPWRRPVAYLSKKLDPVAAGWPPCLRMVAAIAVLTKDVGKLTMGQPLVILAPHAVEALVKQPPDRWLSNARMTHYQALLLDTDRVQFGPIVALNPATLLPLPEEGLQHDCLDILAEAHGTRPDLTDQPLPDADHTWYTDGSSFLQEGQRRAGAAVTTETEVIWAKALPAGTSAQRAELIALTQALKMAAGKKLNVYTDSRYAFATAHIHGEIYRRRGWLTSEGKEIKNKDEILALLKALFLPKRLSIIHCPGHQKGNHAEARGNRMADQAAREVATRETPETSTLLAGKRTADGSEFEKRTADGSEFESPKKKAKVE

SEQ ID NO: 7623 - protein, 2096 aa, synthetic construct
MPAAKRVKLDGGDKKYSIGLDIGTNSVGWAVITDEYKVPSKKFKVLGNTDRHSIKKNLIGALLFDSGETAEATRLKRTARRRYTRRKNRICYLQEIFSNEMAKVDDSFFHRLEESFLVEEDKKHERHPIFGNIVDEVAYHEKYPTIYHLRKKLVDSTDKADLRLIYLALAHMIKFRGHFLIEGDLNPDNSDVDKLFIQLVQTYNQLFEENPINASGVDAKAILSARLSKSRRLENLIAQLPGEKKNGLFGNLIALSLGLTPNFKSNFDLAEDAKLQLSKDTYDDDLDNLLAQIGDQYADLFLAAKNLSDAILLSDILRVNTEITKAPLSASMIKRYDEHHQDLTLLKALVRQQLPEKYKEIFFDQSKNGYAGYIDGGASQEEFYKFIKPILEKMDGTEELLVKLNREDLLRKQRTFDNGSIPHQIHLGELHAILRRQEDFYPFLKDNREKIEKILTFRIPYYVGPLARGNSRFAWMTRKSEETITPWNFEEVVDKGASAQSFIERMTNFDKNLPNEKVLPKHSLLYEYFTVYNELTKVKYVTEGMRKPAFLSGEQKKAIVDLLFKTNRKVTVKQLKEDYFKKIECFDSVEISGVEDRFNASLGTYHDLLKIIKDKDFLDNEENEDILEDIVLTLTLFEDREMIEERLKTYAHLFDDKVMKQLKRRRYTGWGRLSRKLINGIRDKQSGKTILDFLKSDGFANRNFMQLIHDDSLTFKEDIQKAQVSGQGDSLHEHIANLAGSPAIKKGILQTVKVVDELVKVMGRHKPENIVIEMARENQTTQKGQKNSRERMKRIEEGIKELGSQILKEHPVENTQLQNEKLYLYYLQNGRDMYVDQELDINRLSDYDVDHIVPQSFLKDDSIDNKVLTRSDKARGKSDNVPSEEVVKKMKNYWRQLLNAKLITQRKFDNLTKAERGGLSELDKAGFIKRQLVETRQITKHVAQILDSRMNTKYDENDKLIREVKVITLKSKLVSDFRKDFQFYKVREINNYHHAHDAYLNAVVGTALIKKYPKLESEFVYGDYKVYDVRKMIAKSEQEIGKATAKYFFYSNIMNFFKTEITLANGEIRKRPLIETNGETGEIVWDKGRDFATVRKVLSMPQVNIVKKTEVQTGGFSKESILPKRNSDKLIARKKDWDPKKYGGFDSPTVAYSVLVVAKVEKGKSKKLKSVKELLGITIMERSSFEKNPIDFLEAKGYKEVKKDLIIKLPKYSLFELENGRKRMLASAGELQKGNELALPSKYVNFLYLASHYEKLKGSPEDNEQKQLFVEQHKHYLDEIIEQISEFSKRVILADANLDKVLSAYNKHRDKPIREQAENIIHLFTLTNLGAPAAFKYFDTTIDRKRYTSTKEVLDATLIHQSITGLYETRIDLSQLGGDGGEAAAKPAPGSSGGTLNIEDEHRLHETSKEPDVSLGSTWLSDFPQAWAETGGMGLAVRQAPLIIPLKATSTPVSIKQYPMSQEARLGIKPHIQRLLDQGILVPCQSPWNTPLLPVKKPGTNDYRPVQDLREVNKRVEDIHPTVPNPYNLLSGLPPSHQWYTVLDLKDAFFCLRLHPTSQPLFAFEWRDPEMGISGQLTWTRLPQGFKNSPTLFDEALHRDLADFRIQHPDLILLQYVDDLLLAATSELDCQQGTRALLQTLGNLGYRASAKKAQICQKQVKYLGYLLKEGQRWLTEARKETVMGQPTPKTPRQLREFLGTAGFCRLWIPGFAEMAAPLYPLTKTGTLFNWGPDQQKAYQEIKQALLTAPALGLPDLTKPFELFVDEKQGYAKGVLTQKLGPWRRPVAYLSKKLDPVAAGWPPCLRMVAAIAVLTKDAGKLTMGQPLVILAPHAVEALVKQPPDRWLSNARMTHYQALLLDTDRVQFGPVVALNPATLLPLPEEGLQHNCLDILAEAHGTRPDLTDQPLPDADHTWYTDGSSLLQEGQRKAGAAVTTETEVIWAKALPAGTSAQRAELIALTQALKMAEGKKLNVYTDSRYAFATAHIHGEIYRRRGLLTSEGKEIKNKDEILALLKALFLPKRLSIIHCPGHQKGHSAEARGNRMADQAARKAAITETPDTSTLLAGKRTADGSEFEKRTADGSEFESPKKKAKVE

SEQ ID NO: 7624 - protein, 2090 aa, synthetic construct
MPAAKRVKLDGGDKKYSIGLDIGTNSVGWAVITDEYKVPSKKFKVLGNTDRHSIKKNLIGALLFDSGETAEATRLKRTARRRYTRRKNRICYLQEIFSNEMAKVDDSFFHRLEESFLVEEDKKHERHPIFGNIVDEVAYHEKYPTIYHLRKKLVDSTDKADLRLIYLALAHMIKFRGHFLIEGDLNPDNSDVDKLFIQLVQTYNQLFEENPINASGVDAKAILSARLSKSRRLENLIAQLPGEKKNGLFGNLIALSLGLTPNFKSNFDLAEDAKLQLSKDTYDDDLDNLLAQIGDQYADLFLAAKNLSDAILLSDILRVNTEITKAPLSASMIKRYDEHHQDLTLLKALVRQQLPEKYKEIFFDQSKNGYAGYIDGGASQEEFYKFIKPILEKMDGTEELLVKLNREDLLRKQRTFDNGSIPHQIHLGELHAILRRQEDFYPFLKDNREKIEKILTFRIPYYVGPLARGNSRFAWMTRKSEETITPWNFEEVVDKGASAQSFIERMTNFDKNLPNEKVLPKHSLLYEYFTVYNELTKVKYVTEGMRKPAFLSGEQKKAIVDLLFKTNRKVTVKQLKEDYFKKIECFDSVEISGVEDRFNASLGTYHDLLKIIKDKDFLDNEENEDILEDIVLTLTLFEDREMIEERLKTYAHLFDDKVMKQLKRRRYTGWGRLSRKLINGIRDKQSGKTILDFLKSDGFANRNFMQLIHDDSLTFKEDIQKAQVSGQGDSLHEHIANLAGSPAIKKGILQTVKVVDELVKVMGRHKPENIVIEMARENQTTQKGQKNSRERMKRIEEGIKELGSQILKEHPVENTQLQNEKLYLYYLQNGRDMYVDQELDINRLSDYDVDHIVPQSFLKDDSIDNKVLTRSDKARGKSDNVPSEEVVKKMKNYWRQLLNAKLITQRKFDNLTKAERGGLSELDKAGFIKRQLVETRQITKHVAQILDSRMNTKYDENDKLIREVKVITLKSKLVSDFRKDFQFYKVREINNYHHAHDAYLNAVVGTALIKKYPKLESEFVYGDYKVYDVRKMIAKSEQEIGKATAKYFFYSNIMNFFKTEITLANGEIRKRPLIETNGETGEIVWDKGRDFATVRKVLSMPQVNIVKKTEVQTGGFSKESILPKRNSDKLIARKKDWDPKKYGGFDSPTVAYSVLVVAKVEKGKSKKLKSVKELLGITIMERSSFEKNPIDFLEAKGYKEVKKDLIIKLPKYSLFELENGRKRMLASAGELQKGNELALPSKYVNFLYLASHYEKLKGSPEDNEQKQLFVEQHKHYLDEIIEQISEFSKRVILADANLDKVLSAYNKHRDKPIREQAENIIHLFTLTNLGAPAAFKYFDTTIDRKRYTSTKEVLDATLIHQSITGLYETRIDLSQLGGDGGEAAAKPAPGSSGGTLQLDDEYRLYSPLVKPDQNIQFWLEQFPQAWAETAGMGLAKQVPPQVIQLKASATPVSVRQYPLSKEAQEGIRPHVQRLIQQGILVPVQSPWNTPLLPVRKPGTNDYRPVQDLREVNKRVQDIHPTVPNPYNLLCALPPQRSWYTVLDLKDAFFCLRLHPTSQPLFAFEWRDPGTGRTGQLTWTRLPQGFKNSPTIFDEALHRDLANFRIQHPQVTLLQYVDDLLLAGATKQDCLEGTKALLLELSDLGYRASAKKAQICRREVTYLGYSLRDGQRWLTEARKKTVVQIPAPTTAKQVREFLGTAGFCRLWIPGFATLAAPLYPLTKEKGEFSWAPEHQKAFDAIKKALLSAPALALPDVTKPFTLYVDERKGVARGVLTQTLGPWRRPVAYLSKKLDPVASGWPVCLKAIAAVAILVKDADKLTLGQNITVIAPHALENIVRQPPDRWMTNARMTHYQSLLLTERVTFAPPAALNPATLLPEETDEPVTHDCHQLLIEETGVRKDLTDIPLTGEVLTWFTDGSSYVVEGKRMAGAAVVDGTRTIWASSLPEGTSAQKAELMALTQALRLAEGKSINIYTDSRYAFATAHVHGAIYKQRGLLTSAGREIKNKEEILSLLEALHLPKRLAIIHCPGHQKAKDPISRGNQMADRVAKQAAQGVNLLAGKRTADGSEFEKRTADGSEFESPKKKAKVE

SEQ ID NO: 7625 - protein, 2096 aa, synthetic construct
MPAAKRVKLDGGDKKYSIGLDIGTNSVGWAVITDEYKVPSKKFKVLGNTDRHSIKKNLIGALLFDSGETAEATRLKRTARRRYTRRKNRICYLQEIFSNEMAKVDDSFFHRLEESFLVEEDKKHERHPIFGNIVDEVAYHEKYPTIYHLRKKLVDSTDKADLRLIYLALAHMIKFRGHFLIEGDLNPDNSDVDKLFIQLVQTYNQLFEENPINASGVDAKAILSARLSKSRRLENLIAQLPGEKKNGLFGNLIALSLGLTPNFKSNFDLAEDAKLQLSKDTYDDDLDNLLAQIGDQYADLFLAAKNLSDAILLSDILRVNTEITKAPLSASMIKRYDEHHQDLTLLKALVRQQLPEKYKEIFFDQSKNGYAGYIDGGASQEEFYKFIKPILEKMDGTEELLVKLNREDLLRKQRTFDNGSIPHQIHLGELHAILRRQEDFYPFLKDNREKIEKILTFRIPYYVGPLARGNSRFAWMTRKSEETITPWNFEEVVDKGASAQSFIERMTNFDKNLPNEKVLPKHSLLYEYFTVYNELTKVKYVTEGMRKPAFLSGEQKKAIVDLLFKTNRKVTVKQLKEDYFKKIECFDSVEISGVEDRFNASLGTYHDLLKIIKDKDFLDNEENEDILEDIVLTLTLFEDREMIEERLKTYAHLFDDKVMKQLKRRRYTGWGRLSRKLINGIRDKQSGKTILDFLKSDGFANRNFMQLIHDDSLTFKEDIQKAQVSGQGDSLHEHIANLAGSPAIKKGILQTVKVVDELVKVMGRHKPENIVIEMARENQTTQKGQKNSRERMKRIEEGIKELGSQILKEHPVENTQLQNEKLYLYYLQNGRDMYVDQELDINRLSDYDVDHIVPQSFLKDDSIDNKVLTRSDKARGKSDNVPSEEVVKKMKNYWRQLLNAKLITQRKFDNLTKAERGGLSELDKAGFIKRQLVETRQITKHVAQILDSRMNTKYDENDKLIREVKVITLKSKLVSDFRKDFQFYKVREINNYHHAHDAYLNAVVGTALIKKYPKLESEFVYGDYKVYDVRKMIAKSEQEIGKATAKYFFYSNIMNFFKTEITLANGEIRKRPLIETNGETGEIVWDKGRDFATVRKVLSMPQVNIVKKTEVQTGGFSKESILPKRNSDKLIARKKDWDPKKYGGFDSPTVAYSVLVVAKVEKGKSKKLKSVKELLGITIMERSSFEKNPIDFLEAKGYKEVKKDLIIKLPKYSLFELENGRKRMLASAGELQKGNELALPSKYVNFLYLASHYEKLKGSPEDNEQKQLFVEQHKHYLDEIIEQISEFSKRVILADANLDKVLSAYNKHRDKPIREQAENIIHLFTLTNLGAPAAFKYFDTTIDRKRYTSTKEVLDATLIHQSITGLYETRIDLSQLGGDGGEAAAKPAPGSSGGTLNIEDEYRLHETSKEPDVPLGSTWLSDFPQAWAETGGMGLAVRQAPLIIPLKATSTPVSIKQYPMSQEARLGIKPHIQRLLDQGILVPCQSPWNTPLLPVKKPGTNDYRPVQDLREVNKRVEDIHPTVPNPYNLLSGLPPSHQWYTVLDLKDAFFCLRLHPTSQPLFAFEWRDPEMGISGQLTWTRLPQGFKNSPTLFNEALHRDLADFRIQHPDLILLQYVDDLLLAATSEQDCQRGTRALLQTLGNLGYRASAKKAQICQKQVKYLGYLLKEGQRWLTEARKETVMGQPTPKTPRQLREFLGTAGFCRLWIPGFAEMAAPLYPLTKPGTLFNWGPDQQKAYQEIKQALLTAPALGLPDLTKPFELFVDEKQGYAKGVLTQKLGPWRRPVAYLSKKLDPVAAGWPPCLRMVAAIAVLTKDAGKLTMGQPLVILAPHAVEALVKQPPDRWLSNARMTHYQAMLLDTDRVQFGPVVALNPATLLPLPEKEAPHDCLEILAETHGTRPDLTDQPIPDADYTWYTDGSSFLQEGQRRAGAAVTTETEVIWARALPAGTSAQRAELIALTQALKMAEGKKLNVYTDSRYAFATAHVHGEIYRRRGWLTSEGREIKNKNEILALLKALFLPKRLSIIHCPGHQKGNSAEARGNRMADQAAREAAMKAVLETSTLLAGKRTADGSEFEKRTADGSEFESPKKKAKVE

SEQ ID NO: 7626 - protein, 2098 aa, synthetic construct
MPAAKRVKLDGGDKKYSIGLDIGTNSVGWAVITDEYKVPSKKFKVLGNTDRHSIKKNLIGALLFDSGETAEATRLKRTARRRYTRRKNRICYLQEIFSNEMAKVDDSFFHRLEESFLVEEDKKHERHPIFGNIVDEVAYHEKYPTIYHLRKKLVDSTDKADLRLIYLALAHMIKFRGHFLIEGDLNPDNSDVDKLFIQLVQTYNQLFEENPINASGVDAKAILSARLSKSRRLENLIAQLPGEKKNGLFGNLIALSLGLTPNFKSNFDLAEDAKLQLSKDTYDDDLDNLLAQIGDQYADLFLAAKNLSDAILLSDILRVNTEITKAPLSASMIKRYDEHHQDLTLLKALVRQQLPEKYKEIFFDQSKNGYAGYIDGGASQEEFYKFIKPILEKMDGTEELLVKLNREDLLRKQRTFDNGSIPHQIHLGELHAILRRQEDFYPFLKDNREKIEKILTFRIPYYVGPLARGNSRFAWMTRKSEETITPWNFEEVVDKGASAQSFIERMTNFDKNLPNEKVLPKHSLLYEYFTVYNELTKVKYVTEGMRKPAFLSGEQKKAIVDLLFKTNRKVTVKQLKEDYFKKIECFDSVEISGVEDRFNASLGTYHDLLKIIKDKDFLDNEENEDILEDIVLTLTLFEDREMIEERLKTYAHLFDDKVMKQLKRRRYTGWGRLSRKLINGIRDKQSGKTILDFLKSDGFANRNFMQLIHDDSLTFKEDIQKAQVSGQGDSLHEHIANLAGSPAIKKGILQTVKVVDELVKVMGRHKPENIVIEMARENQTTQKGQKNSRERMKRIEEGIKELGSQILKEHPVENTQLQNEKLYLYYLQNGRDMYVDQELDINRLSDYDVDHIVPQSFLKDDSIDNKVLTRSDKARGKSDNVPSEEVVKKMKNYWRQLLNAKLITQRKFDNLTKAERGGLSELDKAGFIKRQLVETRQITKHVAQILDSRMNTKYDENDKLIREVKVITLKSKLVSDFRKDFQFYKVREINNYHHAHDAYLNAVVGTALIKKYPKLESEFVYGDYKVYDVRKMIAKSEQEIGKATAKYFFYSNIMNFFKTEITLANGEIRKRPLIETNGETGEIVWDKGRDFATVRKVLSMPQVNIVKKTEVQTGGFSKESILPKRNSDKLIARKKDWDPKKYGGFDSPTVAYSVLVVAKVEKGKSKKLKSVKELLGITIMERSSFEKNPIDFLEAKGYKEVKKDLIIKLPKYSLFELENGRKRMLASAGELQKGNELALPSKYVNFLYLASHYEKLKGSPEDNEQKQLFVEQHKHYLDEIIEQISEFSKRVILADANLDKVLSAYNKHRDKPIREQAENIIHLFTLTNLGAPAAFKYFDTTIDRKRYTSTKEVLDATLIHQSITGLYETRIDLSQLGGDGGPAPGSSEAAAKGGTAPLEEEYRLFLEAPIQNVTLLEQWKREIPKVWAEINPPGLASTQAPIHVQLLSTALPVRVRQYPITLEAKRSLRETIRKFRAAGILRPVHSPWNTPLLPVRKSGTSEYRMVQDLREVNKRVETIHPTVPNPYTLLSLLPPDRIWYSVLDLKDAFFCIPLAPESQLIFAFEWADAEEGESGQLTWTRLPQGFKNSPTLFNEALNRDLQGFRLDHPSVSLLQYVDDLLIAADTQAACLSATRDLLMTLAELGYRVSGKKAQLCQEEVTYLGFKIHKGSRSLSNSRTQAILQIPVPKTKRQVREFLGTIGYCRLWIPGFAELAQPLYAATRPGNDPLVWGEKEEEAFQSLKLALTQPPALALPSLDKPFQLFVEETSGAAKGVLTQALGPWKRPVAYLSKRLDPVAAGWPRCLRAIAAAALLTREASKLTFGQDIEITSSHNLESLLRSPPDKWLTNARITQYQVLLLDPPRVRFKQTAALNPATLLPETDDTLPIHHCLDTLDSLTSTRPDLTDQPLAQAEATLFTDGSSYIRDGKRYAGAAVVTLDSVIWAEPLPIGTSAQKAELIALTKALEWSKDKSVNIYTDSRYAFATLHVHGMIYRERGWLTAGGKAIKNAPEILALLTAVWLPKRVAVMHCKGHQKDDAPTSTGNRRADEVAREVAIRPLSTQATISAGKRTADGSEFEKRTADGSEFESPKKKAKVE

SEQ ID NO: 7627 - protein, 2098 aa, synthetic construct
MPAAKRVKLDGGDKKYSIGLDIGTNSVGWAVITDEYKVPSKKFKVLGNTDRHSIKKNLIGALLFDSGETAEATRLKRTARRRYTRRKNRICYLQEIFSNEMAKVDDSFFHRLEESFLVEEDKKHERHPIFGNIVDEVAYHEKYPTIYHLRKKLVDSTDKADLRLIYLALAHMIKFRGHFLIEGDLNPDNSDVDKLFIQLVQTYNQLFEENPINASGVDAKAILSARLSKSRRLENLIAQLPGEKKNGLFGNLIALSLGLTPNFKSNFDLAEDAKLQLSKDTYDDDLDNLLAQIGDQYADLFLAAKNLSDAILLSDILRVNTEITKAPLSASMIKRYDEHHQDLTLLKALVRQQLPEKYKEIFFDQSKNGYAGYIDGGASQEEFYKFIKPILEKMDGTEELLVKLNREDLLRKQRTFDNGSIPHQIHLGELHAILRRQEDFYPFLKDNREKIEKILTFRIPYYVGPLARGNSRFAWMTRKSEETITPWNFEEVVDKGASAQSFIERMTNFDKNLPNEKVLPKHSLLYEYFTVYNELTKVKYVTEGMRKPAFLSGEQKKAIVDLLFKTNRKVTVKQLKEDYFKKIECFDSVEISGVEDRFNASLGTYHDLLKIIKDKDFLDNEENEDILEDIVLTLTLFEDREMIEERLKTYAHLFDDKVMKQLKRRRYTGWGRLSRKLINGIRDKQSGKTILDFLKSDGFANRNFMQLIHDDSLTFKEDIQKAQVSGQGDSLHEHIANLAGSPAIKKGILQTVKVVDELVKVMGRHKPENIVIEMARENQTTQKGQKNSRERMKRIEEGIKELGSQILKEHPVENTQLQNEKLYLYYLQNGRDMYVDQELDINRLSDYDVDHIVPQSFLKDDSIDNKVLTRSDKARGKSDNVPSEEVVKKMKNYWRQLLNAKLITQRKFDNLTKAERGGLSELDKAGFIKRQLVETRQITKHVAQILDSRMNTKYDENDKLIREVKVITLKSKLVSDFRKDFQFYKVREINNYHHAHDAYLNAVVGTALIKKYPKLESEFVYGDYKVYDVRKMIAKSEQEIGKATAKYFFYSNIMNFFKTEITLANGEIRKRPLIETNGETGEIVWDKGRDFATVRKVLSMPQVNIVKKTEVQTGGFSKESILPKRNSDKLIARKKDWDPKKYGGFDSPTVAYSVLVVAKVEKGKSKKLKSVKELLGITIMERSSFEKNPIDFLEAKGYKEVKKDLIIKLPKYSLFELENGRKRMLASAGELQKGNELALPSKYVNFLYLASHYEKLKGSPEDNEQKQLFVEQHKHYLDEIIEQISEFSKRVILADANLDKVLSAYNKHRDKPIREQAENIIHLFTLTNLGAPAAFKYFDTTIDRKRYTSTKEVLDATLIHQSITGLYETRIDLSQLGGDGGPAPGSSEAAAKGGTAPLEEEYRLFLEAPIQNVTLLEQWKREIPKVWAEINPPGLASTQAPIHVQLLSTALPVRVRQYPITLEAKRSLRETIRKFRAAGILRPVHSPWNTPLLPVRKSGTSEYRMVQDLREVNKRVETIHPTVPNPYTLLSLLPPDRIWYSVLDLKDAFFCIPLAPESQLIFAFEWADAEEGESGQLTWTRLPQGFKNSPTLFNEALNRDLQGFRLDHPSVSLLQYVDDLLIAADTQAACLSATRDLLMTLAELGYRVSGKKAQLCQEEVTYLGFKIHKGSRSLSNSRTQAILQIPVPKTKRQVREFLGKIGYCRLFIPGFAELAQPLYAATRPGNDPLVWGEKEEEAFQSLKLALTQPPALALPSLDKPFQLFVEETSGAAKGVLTQALGPWKRPVAYLSKRLDPVAAGWPRCLRAIAAAALLTREASKLTFGQDIEITSSHNLESLLRSPPDKWLTNARITQYQVLLLDPPRVRFKQTAALNPATLLPETDDTLPIHHCLDTLDSLTSTRPDLTDQPLAQAEATLFTDGSSYIRDGKRYAGAAVVTLDSVIWAEPLPIGTSAQKAELIALTKALEWSKDKSVNIYTDSRYAFATLHVHGMIYRERGWLTAGGKAIKNAPEILALLTAVWLPKRVAVMHCKGHQKDDAPTSTGNRRADEVAREVAIRPLSTQATISAGKRTADGSEFEKRTADGSEFESPKKKAKVE

SEQ ID NO: 7628 - protein, 2087 aa, synthetic construct
MPAAKRVKLDGGDKKYSIGLDIGTNSVGWAVITDEYKVPSKKFKVLGNTDRHSIKKNLIGALLFDSGETAEATRLKRTARRRYTRRKNRICYLQEIFSNEMAKVDDSFFHRLEESFLVEEDKKHERHPIFGNIVDEVAYHEKYPTIYHLRKKLVDSTDKADLRLIYLALAHMIKFRGHFLIEGDLNPDNSDVDKLFIQLVQTYNQLFEENPINASGVDAKAILSARLSKSRRLENLIAQLPGEKKNGLFGNLIALSLGLTPNFKSNFDLAEDAKLQLSKDTYDDDLDNLLAQIGDQYADLFLAAKNLSDAILLSDILRVNTEITKAPLSASMIKRYDEHHQDLTLLKALVRQQLPEKYKEIFFDQSKNGYAGYIDGGASQEEFYKFIKPILEKMDGTEELLVKLNREDLLRKQRTFDNGSIPHQIHLGELHAILRRQEDFYPFLKDNREKIEKILTFRIPYYVGPLARGNSRFAWMTRKSEETITPWNFEEVVDKGASAQSFIERMTNFDKNLPNEKVLPKHSLLYEYFTVYNELTKVKYVTEGMRKPAFLSGEQKKAIVDLLFKTNRKVTVKQLKEDYFKKIECFDSVEISGVEDRFNASLGTYHDLLKIIKDKDFLDNEENEDILEDIVLTLTLFEDREMIEERLKTYAHLFDDKVMKQLKRRRYTGWGRLSRKLINGIRDKQSGKTILDFLKSDGFANRNFMQLIHDDSLTFKEDIQKAQVSGQGDSLHEHIANLAGSPAIKKGILQTVKVVDELVKVMGRHKPENIVIEMARENQTTQKGQKNSRERMKRIEEGIKELGSQILKEHPVENTQLQNEKLYLYYLQNGRDMYVDQELDINRLSDYDVDHIVPQSFLKDDSIDNKVLTRSDKARGKSDNVPSEEVVKKMKNYWRQLLNAKLITQRKFDNLTKAERGGLSELDKAGFIKRQLVETRQITKHVAQILDSRMNTKYDENDKLIREVKVITLKSKLVSDFRKDFQFYKVREINNYHHAHDAYLNAVVGTALIKKYPKLESEFVYGDYKVYDVRKMIAKSEQEIGKATAKYFFYSNIMNFFKTEITLANGEIRKRPLIETNGETGEIVWDKGRDFATVRKVLSMPQVNIVKKTEVQTGGFSKESILPKRNSDKLIARKKDWDPKKYGGFDSPTVAYSVLVVAKVEKGKSKKLKSVKELLGITIMERSSFEKNPIDFLEAKGYKEVKKDLIIKLPKYSLFELENGRKRMLASAGELQKGNELALPSKYVNFLYLASHYEKLKGSPEDNEQKQLFVEQHKHYLDEIIEQISEFSKRVILADANLDKVLSAYNKHRDKPIREQAENIIHLFTLTNLGAPAAFKYFDTTIDRKRYTSTKEVLDATLIHQSITGLYETRIDLSQLGGDGGPAPGSSEAAAKGGVPWILKKPLELTIKLDLEEQQGTLLNNSILSKKGKEELKQLFEKYSALWQSWENQVGHRRIRPHKIATGTVKPTPQKQYHINPKAKPDIQIVINDLLKQGVLIQKESTMNTPVYPVPKPNGRWRMVLDYRAVNKVTPLIAVQNQHSYGILGSLFKGRYKTTIDLSNGFWAHPIVPEDYWITAFTWQGKQYCWTVLPQGFLNSPGLFTGDVVDLLQGIPNVEVYVDDVYISHDSEKEHLEYLDILFNRLKEAGYIISLKKSNIANSIVDFLGFQITNEGRGLTDTFKEKLENITAPTTLKQLQSILGLLNFARNFIPDFTELIAPLYALIPKSTKNYVPWQIEHSTTLETLITKLNGAEYLQGRKGDKTLIMKVNASYTTGYIRYYNEGEKKPISYVSIVFSKTELKFTELEKLLTTVHKGLLKALDLSMGQNIHVYSPIVSMQNIQKTPQTAKKALASRWLSWLSYLEDPRIRFFYDPQMPALKDLPAVDTGKDNKKHPSNFQHIFYTDGSAITSPTKEGHLNAGMGIVYFINKDGNLQKQQEWSISLGNHTAQFAEIAAFEFALKKCLPLGGNILVVTDSNYVAKAYNEELDVWASNGFVNNRKKPLKHISKWKSVADLKRLRPDVVVTHEPGHQKLDSSPHAYGNNLADQLATQASFKVHAGKRTADGSEFEKRTADGSEFESPKKKAKVE

SEQ ID NO: 7629 - protein, 2095 aa, synthetic construct
MPAAKRVKLDGGDKKYSIGLDIGTNSVGWAVITDEYKVPSKKFKVLGNTDRHSIKKNLIGALLFDSGETAEATRLKRTARRRYTRRKNRICYLQEIFSNEMAKVDDSFFHRLEESFLVEEDKKHERHPIFGNIVDEVAYHEKYPTIYHLRKKLVDSTDKADLRLIYLALAHMIKFRGHFLIEGDLNPDNSDVDKLFIQLVQTYNQLFEENPINASGVDAKAILSARLSKSRRLENLIAQLPGEKKNGLFGNLIALSLGLTPNFKSNFDLAEDAKLQLSKDTYDDDLDNLLAQIGDQYADLFLAAKNLSDAILLSDILRVNTEITKAPLSASMIKRYDEHHQDLTLLKALVRQQLPEKYKEIFFDQSKNGYAGYIDGGASQEEFYKFIKPILEKMDGTEELLVKLNREDLLRKQRTFDNGSIPHQIHLGELHAILRRQEDFYPFLKDNREKIEKILTFRIPYYVGPLARGNSRFAWMTRKSEETITPWNFEEVVDKGASAQSFIERMTNFDKNLPNEKVLPKHSLLYEYFTVYNELTKVKYVTEGMRKPAFLSGEQKKAIVDLLFKTNRKVTVKQLKEDYFKKIECFDSVEISGVEDRFNASLGTYHDLLKIIKDKDFLDNEENEDILEDIVLTLTLFEDREMIEERLKTYAHLFDDKVMKQLKRRRYTGWGRLSRKLINGIRDKQSGKTILDFLKSDGFANRNFMQLIHDDSLTFKEDIQKAQVSGQGDSLHEHIANLAGSPAIKKGILQTVKVVDELVKVMGRHKPENIVIEMARENQTTQKGQKNSRERMKRIEEGIKELGSQILKEHPVENTQLQNEKLYLYYLQNGRDMYVDQELDINRLSDYDVDHIVPQSFLKDDSIDNKVLTRSDKARGKSDNVPSEEVVKKMKNYWRQLLNAKLITQRKFDNLTKAERGGLSELDKAGFIKRQLVETRQITKHVAQILDSRMNTKYDENDKLIREVKVITLKSKLVSDFRKDFQFYKVREINNYHHAHDAYLNAVVGTALIKKYPKLESEFVYGDYKVYDVRKMIAKSEQEIGKATAKYFFYSNIMNFFKTEITLANGEIRKRPLIETNGETGEIVWDKGRDFATVRKVLSMPQVNIVKKTEVQTGGFSKESILPKRNSDKLIARKKDWDPKKYGGFDSPTVAYSVLVVAKVEKGKSKKLKSVKELLGITIMERSSFEKNPIDFLEAKGYKEVKKDLIIKLPKYSLFELENGRKRMLASAGELQKGNELALPSKYVNFLYLASHYEKLKGSPEDNEQKQLFVEQHKHYLDEIIEQISEFSKRVILADANLDKVLSAYNKHRDKPIREQAENIIHLFTLTNLGAPAAFKYFDTTIDRKRYTSTKEVLDATLIHQSITGLYETRIDLSQLGGDGGPAPGSSEAAAKGGTLQLEEEYRLFEPESTQKQEMDIWLKNFPQAWAETGGMGTAHCQAPVLIQLKATATPISIRQYPMPHEAYQGIKPHIRRMLDQGILKPCQSPWNTPLLPVKKPGTEDYRPVQDLREVNKRVEDIHPTVPNPYNLLSTLPPSHPWYTVLDLKDAFFCLRLHSESQLLFAFEWRDPEIGLSGQLTWTRLPQGFKNSPTLFNEALHSDLADFRVRYPALVLLQYVDDLLLAAATRTECLEGTKALLETLGNKGYRASAKKAQICLQEVTYLGYSLKDGQRWLTKARKEAILSIPVPKNSRQVREFLGTAGYCRLWIPGFAELAAPLYPLTRPGTLFQWGTEQQLAFEDIKKALLSSPALGLPDITKPFELFIDENSGFAKGVLVQKLGPWKRPVAYLSKKLDTVASGWPPCLRMVAAIAILVKDAGKLTLGQPLTILTSHPVEALVRQPPNKWLSNARMTHYQAMLLDAERVHFGPTVSLNPATLLPLPSGGNHHDCLQILAETHGTRPDLTDQPLPDADLTWYTDGSSFIRNGEREAGAAVTTESEVIWAAPLPPGTSAQRAELIALTQALKMAEGKKLTVYTDSRYAFATTHVHGEIYRRRGWLTSEGKEIKNKNEILALLEALFLPKRLSIIHCPGHQKGDSPQAKGNRLADDTAKKAATETHSSLTVLPAGKRTADGSEFEKRTADGSEFESPKKKAKVE

SEQ ID NO: 7630 - protein, 2094 aa, synthetic construct
MPAAKRVKLDGGDKKYSIGLDIGTNSVGWAVITDEYKVPSKKFKVLGNTDRHSIKKNLIGALLFDSGETAEATRLKRTARRRYTRRKNRICYLQEIFSNEMAKVDDSFFHRLEESFLVEEDKKHERHPIFGNIVDEVAYHEKYPTIYHLRKKLVDSTDKADLRLIYLALAHMIKFRGHFLIEGDLNPDNSDVDKLFIQLVQTYNQLFEENPINASGVDAKAILSARLSKSRRLENLIAQLPGEKKNGLFGNLIALSLGLTPNFKSNFDLAEDAKLQLSKDTYDDDLDNLLAQIGDQYADLFLAAKNLSDAILLSDILRVNTEITKAPLSASMIKRYDEHHQDLTLLKALVRQQLPEKYKEIFFDQSKNGYAGYIDGGASQEEFYKFIKPILEKMDGTEELLVKLNREDLLRKQRTFDNGSIPHQIHLGELHAILRRQEDFYPFLKDNREKIEKILTFRIPYYVGPLARGNSRFAWMTRKSEETITPWNFEEVVDKGASAQSFIERMTNFDKNLPNEKVLPKHSLLYEYFTVYNELTKVKYVTEGMRKPAFLSGEQKKAIVDLLFKTNRKVTVKQLKEDYFKKIECFDSVEISGVEDRFNASLGTYHDLLKIIKDKDFLDNEENEDILEDIVLTLTLFEDREMIEERLKTYAHLFDDKVMKQLKRRRYTGWGRLSRKLINGIRDKQSGKTILDFLKSDGFANRNFMQLIHDDSLTFKEDIQKAQVSGQGDSLHEHIANLAGSPAIKKGILQTVKVVDELVKVMGRHKPENIVIEMARENQTTQKGQKNSRERMKRIEEGIKELGSQILKEHPVENTQLQNEKLYLYYLQNGRDMYVDQELDINRLSDYDVDHIVPQSFLKDDSIDNKVLTRSDKARGKSDNVPSEEVVKKMKNYWRQLLNAKLITQRKFDNLTKAERGGLSELDKAGFIKRQLVETRQITKHVAQILDSRMNTKYDENDKLIREVKVITLKSKLVSDFRKDFQFYKVREINNYHHAHDAYLNAVVGTALIKKYPKLESEFVYGDYKVYDVRKMIAKSEQEIGKATAKYFFYSNIMNFFKTEITLANGEIRKRPLIETNGETGEIVWDKGRDFATVRKVLSMPQVNIVKKTEVQTGGFSKESILPKRNSDKLIARKKDWDPKKYGGFDSPTVAYSVLVVAKVEKGKSKKLKSVKELLGITIMERSSFEKNPIDFLEAKGYKEVKKDLIIKLPKYSLFELENGRKRMLASAGELQKGNELALPSKYVNFLYLASHYEKLKGSPEDNEQKQLFVEQHKHYLDEIIEQISEFSKRVILADANLDKVLSAYNKHRDKPIREQAENIIHLFTLTNLGAPAAFKYFDTTIDRKRYTSTKEVLDATLIHQSITGLYETRIDLSQLGGDGGPAPGSSEAAAKGGVLNLEEEYRLHEKPVPSSIDPSWLQLFPTVWAERAGMGLANQVPPVVVELRSGASPVAVRQYPMSKEAREGIRPHIQKFLDLGVLVPCRSPWNTPLLPVKKPGTNDYRPVQDLREINKRVQDIHPTVPNPYNLLSSLPPSYTWYSVLDLKDAFFCLRLHPNSQPLFAFEWKDPEKGNTGQLTWTRLPQGFKNSPTLFNEALHRDLAPFRALNPQVVLLQYVDDLLVAAPTYEDCKKGTQKLLQELSKLGYRVSAKKAQLCQREVTYLGYLLKEGKRWLTPARKATVMKIPVPTTPRQVREFLGKAGFCRLFIPGFASLAAPLYPLTKPSIPFIWTEEHQQAFDHIKKALLSAPALALPDLTKPFTLYIDERAGVARGVLTQTLGPWRRPVAYLSKKLDPVASGWPTCLKAVAAVALLLKDADKLTLGQNVTVIASHSLESIVRQPPDRWMTNARMTHYQSLLLNERVSFAPPAVLNPATLLPVESEATPVHRCSEILAEETGTRRDLEDQPLPGVPTWYTDGSSFITEGKRRAGAPIVDGKRTVWASSLPEGTSAQKAELVALTQALRLAEGKNINIYTDSRYAFATAHIHGAIYKQRGWLTSAGKDIKNKEEILALLEAIHLPRRVAIIHCPGHQRGSNPVATGNRRADEAAKQAALSTRVLAGTTKPAGKRTADGSEFEKRTADGSEFESPKKKAKVE

SEQ ID NO: 7631 - protein, 2218 aa, synthetic construct
MPAAKRVKLDGGDKKYSIGLDIGTNSVGWAVITDEYKVPSKKFKVLGNTDRHSIKKNLIGALLFDSGETAEATRLKRTARRRYTRRKNRICYLQEIFSNEMAKVDDSFFHRLEESFLVEEDKKHERHPIFGNIVDEVAYHEKYPTIYHLRKKLVDSTDKADLRLIYLALAHMIKFRGHFLIEGDLNPDNSDVDKLFIQLVQTYNQLFEENPINASGVDAKAILSARLSKSRRLENLIAQLPGEKKNGLFGNLIALSLGLTPNFKSNFDLAEDAKLQLSKDTYDDDLDNLLAQIGDQYADLFLAAKNLSDAILLSDILRVNTEITKAPLSASMIKRYDEHHQDLTLLKALVRQQLPEKYKEIFFDQSKNGYAGYIDGGASQEEFYKFIKPILEKMDGTEELLVKLNREDLLRKQRTFDNGSIPHQIHLGELHAILRRQEDFYPFLKDNREKIEKILTFRIPYYVGPLARGNSRFAWMTRKSEETITPWNFEEVVDKGASAQSFIERMTNFDKNLPNEKVLPKHSLLYEYFTVYNELTKVKYVTEGMRKPAFLSGEQKKAIVDLLFKTNRKVTVKQLKEDYFKKIECFDSVEISGVEDRFNASLGTYHDLLKIIKDKDFLDNEENEDILEDIVLTLTLFEDREMIEERLKTYAHLFDDKVMKQLKRRRYTGWGRLSRKLINGIRDKQSGKTILDFLKSDGFANRNFMQLIHDDSLTFKEDIQKAQVSGQGDSLHEHIANLAGSPAIKKGILQTVKVVDELVKVMGRHKPENIVIEMARENQTTQKGQKNSRERMKRIEEGIKELGSQILKEHPVENTQLQNEKLYLYYLQNGRDMYVDQELDINRLSDYDVDHIVPQSFLKDDSIDNKVLTRSDKARGKSDNVPSEEVVKKMKNYWRQLLNAKLITQRKFDNLTKAERGGLSELDKAGFIKRQLVETRQITKHVAQILDSRMNTKYDENDKLIREVKVITLKSKLVSDFRKDFQFYKVREINNYHHAHDAYLNAVVGTALIKKYPKLESEFVYGDYKVYDVRKMIAKSEQEIGKATAKYFFYSNIMNFFKTEITLANGEIRKRPLIETNGETGEIVWDKGRDFATVRKVLSMPQVNIVKKTEVQTGGFSKESILPKRNSDKLIARKKDWDPKKYGGFDSPTVAYSVLVVAKVEKGKSKKLKSVKELLGITIMERSSFEKNPIDFLEAKGYKEVKKDLIIKLPKYSLFELENGRKRMLASAGELQKGNELALPSKYVNFLYLASHYEKLKGSPEDNEQKQLFVEQHKHYLDEIIEQISEFSKRVILADANLDKVLSAYNKHRDKPIREQAENIIHLFTLTNLGAPAAFKYFDTTIDRKRYTSTKEVLDATLIHQSITGLYETRIDLSQLGGDGGPAPGSSEAAAKGGTLGDQGSRGSDPLPEPRVTLTVEGIPTEFLVNTGAEHSVLTKPMGKMGSKRTVVAGATGSKVYPWTTKRLLKIGQKQVTHSFLVIPECPAPLLGRDLLTKLKAQIQFSTEGPQVTWEDRPAMCLVLNLEEEYRLHEKPVPPSIDPSWLQLFPMVWAEKAGMGLANQVPPVVVELKSDASPVAVRQYPMSKEAREGIRPHIQRFLDLGILVPCQSPWNTPLLPVKKPGTNDYRPVQDLREVNKRVQDIHPTVPNPYNLLSSLPPSHTWYSVLDLKDAFFCLKLHPNSQPLFAFEWRDPEKGNTGQLTWTRLPQGFKNSPTLFDEALHRDLASFRALNPQVVMLQYVDDLLVAAPTYRDCKEGTRRLLQELSKLGYRVSAKKAQLCREEVTYLGYLLKGGKRWLTPARKATVMKIPTPTTPRQVREFLGTAGFCRLWIPGFASLAAPLYPLTREKVPFTWTEAHQEAFGRIKEALLSAPALALPDLTKPFALYVDEKEGVARGVLTQTLGPWRRPVAYLSKKLDPVASGWPTCLKAIAAVALLLKDADKLTLGQNVLVIAPHNLESIVRQPPDRWMTNARMTHYQSLLLNERVSFAPPAILNPATLLPVESDDTPIHICSEILAEETGTRPDLRDQPLPGVPAWYTDGSSFIMDGRRQAGAAIVDNKRTVWASNLPEGTSAQKAELIALTQALRLAEGKSINIYTDSRYAFATAHVHGAIYKQRGLLTSAGKDIKNKEEILALLEAIHLPKRVAIIHCPGHQRGTDPVATGNRKADEAAKQAAQSTRILTETTKNAGKRTADGSEFEKRTADGSEFESPKKKAKVE

SEQ ID NO: 7632 - protein, 2127 aa, synthetic construct
MPAAKRVKLDGGDKKYSIGLDIGTNSVGWAVITDEYKVPSKKFKVLGNTDRHSIKKNLIGALLFDSGETAEATRLKRTARRRYTRRKNRICYLQEIFSNEMAKVDDSFFHRLEESFLVEEDKKHERHPIFGNIVDEVAYHEKYPTIYHLRKKLVDSTDKADLRLIYLALAHMIKFRGHFLIEGDLNPDNSDVDKLFIQLVQTYNQLFEENPINASGVDAKAILSARLSKSRRLENLIAQLPGEKKNGLFGNLIALSLGLTPNFKSNFDLAEDAKLQLSKDTYDDDLDNLLAQIGDQYADLFLAAKNLSDAILLSDILRVNTEITKAPLSASMIKRYDEHHQDLTLLKALVRQQLPEKYKEIFFDQSKNGYAGYIDGGASQEEFYKFIKPILEKMDGTEELLVKLNREDLLRKQRTFDNGSIPHQIHLGELHAILRRQEDFYPFLKDNREKIEKILTFRIPYYVGPLARGNSRFAWMTRKSEETITPWNFEEVVDKGASAQSFIERMTNFDKNLPNEKVLPKHSLLYEYFTVYNELTKVKYVTEGMRKPAFLSGEQKKAIVDLLFKTNRKVTVKQLKEDYFKKIECFDSVEISGVEDRFNASLGTYHDLLKIIKDKDFLDNEENEDILEDIVLTLTLFEDREMIEERLKTYAHLFDDKVMKQLKRRRYTGWGRLSRKLINGIRDKQSGKTILDFLKSDGFANRNFMQLIHDDSLTFKEDIQKAQVSGQGDSLHEHIANLAGSPAIKKGILQTVKVVDELVKVMGRHKPENIVIEMARENQTTQKGQKNSRERMKRIEEGIKELGSQILKEHPVENTQLQNEKLYLYYLQNGRDMYVDQELDINRLSDYDVDHIVPQSFLKDDSIDNKVLTRSDKARGKSDNVPSEEVVKKMKNYWRQLLNAKLITQRKFDNLTKAERGGLSELDKAGFIKRQLVETRQITKHVAQILDSRMNTKYDENDKLIREVKVITLKSKLVSDFRKDFQFYKVREINNYHHAHDAYLNAVVGTALIKKYPKLESEFVYGDYKVYDVRKMIAKSEQEIGKATAKYFFYSNIMNFFKTEITLANGEIRKRPLIETNGETGEIVWDKGRDFATVRKVLSMPQVNIVKKTEVQTGGFSKESILPKRNSDKLIARKKDWDPKKYGGFDSPTVAYSVLVVAKVEKGKSKKLKSVKELLGITIMERSSFEKNPIDFLEAKGYKEVKKDLIIKLPKYSLFELENGRKRMLASAGELQKGNELALPSKYVNFLYLASHYEKLKGSPEDNEQKQLFVEQHKHYLDEIIEQISEFSKRVILADANLDKVLSAYNKHRDKPIREQAENIIHLFTLTNLGAPAAFKYFDTTIDRKRYTSTKEVLDATLIHQSITGLYETRIDLSQLGGDGGPAPGSSEAAAKGGLLGRDLLTKLKAQIQFSTEGPQVTWEDRPAMCLVLNLEEEYRLHEKPVPPSIDPSWLQLFPMVWAEKAGMGLANQVPPVVVELKSDASPVAVRQYPMSKEAREGIRPHIQRFLDLGILVPCQSPWNTPLLPVKKPGTNDYRPVQDLREVNKRVQDIHPTVPNPYNLLSSLPPSHTWYSVLDLKDAFFCLKLHPNSQPLFAFEWRDPEKGNTGQLTWTRLPQGFKNSPTLFNEALHRDLASFRALNPQVVMLQYVDDLLVAAPTYRDCKEGTRRLLQELSKLGYRVSAKKAQLCREEVTYLGYLLKGGKRWLTPARKATVMKIPTPTTPRQVREFLGTAGFCRLWIPGFASLAAPLYPLTRPKVPFTWTEAHQEAFGRIKEALLSAPALALPDLTKPFALYVDEKEGVARGVLTQTLGPWRRPVAYLSKKLDPVASGWPTCLKAIAAVALLLKDADKLTLGQNVLVIAPHNLESIVRQPPDRWMTNARMTHYQSLLLNERVSFAPPAILNPATLLPVESDDTPIHICSEILAEETGTRPDLRDQPLPGVPAWYTDGSSFIMDGRRQAGAAIVDNKRTVWASNLPEGTSAQKAELIALTQALRLAEGKSINIYTDSRYAFATAHVHGAIYKQRGWLTSAGKDIKNKEEILALLEAIHLPKRVAIIHCPGHQRGTDPVATGNRKADEAAKQAAQSTRILTETTKNAGKRTADGSEFEKRTADGSEFESPKKKAKVE

SEQ ID NO: 7633 - protein, 2127 aa, synthetic construct
MPAAKRVKLDGGDKKYSIGLDIGTNSVGWAVITDEYKVPSKKFKVLGNTDRHSIKKNLIGALLFDSGETAEATRLKRTARRRYTRRKNRICYLQEIFSNEMAKVDDSFFHRLEESFLVEEDKKHERHPIFGNIVDEVAYHEKYPTIYHLRKKLVDSTDKADLRLIYLALAHMIKFRGHFLIEGDLNPDNSDVDKLFIQLVQTYNQLFEENPINASGVDAKAILSARLSKSRRLENLIAQLPGEKKNGLFGNLIALSLGLTPNFKSNFDLAEDAKLQLSKDTYDDDLDNLLAQIGDQYADLFLAAKNLSDAILLSDILRVNTEITKAPLSASMIKRYDEHHQDLTLLKALVRQQLPEKYKEIFFDQSKNGYAGYIDGGASQEEFYKFIKPILEKMDGTEELLVKLNREDLLRKQRTFDNGSIPHQIHLGELHAILRRQEDFYPFLKDNREKIEKILTFRIPYYVGPLARGNSRFAWMTRKSEETITPWNFEEVVDKGASAQSFIERMTNFDKNLPNEKVLPKHSLLYEYFTVYNELTKVKYVTEGMRKPAFLSGEQKKAIVDLLFKTNRKVTVKQLKEDYFKKIECFDSVEISGVEDRFNASLGTYHDLLKIIKDKDFLDNEENEDILEDIVLTLTLFEDREMIEERLKTYAHLFDDKVMKQLKRRRYTGWGRLSRKLINGIRDKQSGKTILDFLKSDGFANRNFMQLIHDDSLTFKEDIQKAQVSGQGDSLHEHIANLAGSPAIKKGILQTVKVVDELVKVMGRHKPENIVIEMARENQTTQKGQKNSRERMKRIEEGIKELGSQILKEHPVENTQLQNEKLYLYYLQNGRDMYVDQELDINRLSDYDVDHIVPQSFLKDDSIDNKVLTRSDKARGKSDNVPSEEVVKKMKNYWRQLLNAKLITQRKFDNLTKAERGGLSELDKAGFIKRQLVETRQITKHVAQILDSRMNTKYDENDKLIREVKVITLKSKLVSDFRKDFQFYKVREINNYHHAHDAYLNAVVGTALIKKYPKLESEFVYGDYKVYDVRKMIAKSEQEIGKATAKYFFYSNIMNFFKTEITLANGEIRKRPLIETNGETGEIVWDKGRDFATVRKVLSMPQVNIVKKTEVQTGGFSKESILPKRNSDKLIARKKDWDPKKYGGFDSPTVAYSVLVVAKVEKGKSKKLKSVKELLGITIMERSSFEKNPIDFLEAKGYKEVKKDLIIKLPKYSLFELENGRKRMLASAGELQKGNELALPSKYVNFLYLASHYEKLKGSPEDNEQKQLFVEQHKHYLDEIIEQISEFSKRVILADANLDKVLSAYNKHRDKPIREQAENIIHLFTLTNLGAPAAFKYFDTTIDRKRYTSTKEVLDATLIHQSITGLYETRIDLSQLGGDGGPAPGSSEAAAKGGLLGRDLLTKLKAQIQFSTEGPQVTWEDRPAMCLVLNLEEEYRLHEKPVPPSIDPSWLQLFPMVWAEKAGMGLANQVPPVVVELKSDASPVAVRQYPMSKEAREGIRPHIQRFLDLGILVPCQSPWNTPLLPVKKPGTNDYRPVQDLREVNKRVQDIHPTVPNPYNLLSSLPPSHTWYSVLDLKDAFFCLKLHPNSQPLFAFEWRDPEKGNTGQLTWTRLPQGFKNSPTLFNEALHRDLASFRALNPQVVMLQYVDDLLVAAPTYRDCKEGTRRLLQELSKLGYRVSAKKAQLCREEVTYLGYLLKGGKRWLTPARKATVMKIPTPTTPRQVREFLGKAGFCRLFIPGFASLAAPLYPLTRPKVPFTWTEAHQEAFGRIKEALLSAPALALPDLTKPFALYVDEKEGVARGVLTQTLGPWRRPVAYLSKKLDPVASGWPTCLKAIAAVALLLKDADKLTLGQNVLVIAPHNLESIVRQPPDRWMTNARMTHYQSLLLNERVSFAPPAILNPATLLPVESDDTPIHICSEILAEETGTRPDLRDQPLPGVPAWYTDGSSFIMDGRRQAGAAIVDNKRTVWASNLPEGTSAQKAELIALTQALRLAEGKSINIYTDSRYAFATAHVHGAIYKQRGWLTSAGKDIKNKEEILALLEAIHLPKRVAIIHCPGHQRGTDPVATGNRKADEAAKQAAQSTRILTETTKNAGKRTADGSEFEKRTADGSEFESPKKKAKVE

SEQ ID NO: 7634 - protein, 2218 aa, synthetic construct
MPAAKRVKLDGGDKKYSIGLDIGTNSVGWAVITDEYKVPSKKFKVLGNTDRHSIKKNLIGALLFDSGETAEATRLKRTARRRYTRRKNRICYLQEIFSNEMAKVDDSFFHRLEESFLVEEDKKHERHPIFGNIVDEVAYHEKYPTIYHLRKKLVDSTDKADLRLIYLALAHMIKFRGHFLIEGDLNPDNSDVDKLFIQLVQTYNQLFEENPINASGVDAKAILSARLSKSRRLENLIAQLPGEKKNGLFGNLIALSLGLTPNFKSNFDLAEDAKLQLSKDTYDDDLDNLLAQIGDQYADLFLAAKNLSDAILLSDILRVNTEITKAPLSASMIKRYDEHHQDLTLLKALVRQQLPEKYKEIFFDQSKNGYAGYIDGGASQEEFYKFIKPILEKMDGTEELLVKLNREDLLRKQRTFDNGSIPHQIHLGELHAILRRQEDFYPFLKDNREKIEKILTFRIPYYVGPLARGNSRFAWMTRKSEETITPWNFEEVVDKGASAQSFIERMTNFDKNLPNEKVLPKHSLLYEYFTVYNELTKVKYVTEGMRKPAFLSGEQKKAIVDLLFKTNRKVTVKQLKEDYFKKIECFDSVEISGVEDRFNASLGTYHDLLKIIKDKDFLDNEENEDILEDIVLTLTLFEDREMIEERLKTYAHLFDDKVMKQLKRRRYTGWGRLSRKLINGIRDKQSGKTILDFLKSDGFANRNFMQLIHDDSLTFKEDIQKAQVSGQGDSLHEHIANLAGSPAIKKGILQTVKVVDELVKVMGRHKPENIVIEMARENQTTQKGQKNSRERMKRIEEGIKELGSQILKEHPVENTQLQNEKLYLYYLQNGRDMYVDQELDINRLSDYDVDHIVPQSFLKDDSIDNKVLTRSDKARGKSDNVPSEEVVKKMKNYWRQLLNAKLITQRKFDNLTKAERGGLSELDKAGFIKRQLVETRQITKHVAQILDSRMNTKYDENDKLIREVKVITLKSKLVSDFRKDFQFYKVREINNYHHAHDAYLNAVVGTALIKKYPKLESEFVYGDYKVYDVRKMIAKSEQEIGKATAKYFFYSNIMNFFKTEITLANGEIRKRPLIETNGETGEIVWDKGRDFATVRKVLSMPQVNIVKKTEVQTGGFSKESILPKRNSDKLIARKKDWDPKKYGGFDSPTVAYSVLVVAKVEKGKSKKLKSVKELLGITIMERSSFEKNPIDFLEAKGYKEVKKDLIIKLPKYSLFELENGRKRMLASAGELQKGNELALPSKYVNFLYLASHYEKLKGSPEDNEQKQLFVEQHKHYLDEIIEQISEFSKRVILADANLDKVLSAYNKHRDKPIREQAENIIHLFTLTNLGAPAAFKYFDTTIDRKRYTSTKEVLDATLIHQSITGLYETRIDLSQLGGDGGPAPGSSEAAAKGGTLGDQGSRGSDPLPEPRVTLTVEGIPTEFLVNTGAEHSVLTKPMGKMGSKRTVVAGATGSKVYPWTTKRLLKIGQKQVTHSFLVIPECPAPLLGRDLLTKLKAQIQFSTEGPQVTWEDRPAMCLVLNLEEEYRLHEKPVPPSIDPSWLQLFPMVWAEKAGMGLANQVPPVVVELKSDASPVAVRQYPMSKEAREGIRPHIQRFLDLGILVPCQSPWNTPLLPVKKPGTNDYRPVQDLREVNKRVQDIHPTVPNPYNLLSSLPPSHTWYSVLDLKDAFFCLKLHPNSQPLFAFEWRDPEKGNTGQLTWTRLPQGFKNSPTLFNEALHRDLASFRALNPQVVMLQYVDDLLVAAPTYRDCKEGTRRLLQELSKLGYRVSAKKAQLCREEVTYLGYLLKGGKRWLTPARKATVMKIPTPTTPRQVREFLGTAGFCRLWIPGFASLAAPLYPLTRPKVPFTWTEAHQEAFGRIKEALLSAPALALPDLTKPFALYVDEKEGVARGVLTQTLGPWRRPVAYLSKKLDPVASGWPTCLKAIAAVALLLKDADKLTLGQNVLVIAPHNLESIVRQPPDRWMTNARMTHYQSLLLNERVSFAPPAILNPATLLPVESDDTPIHICSEILAEETGTRPDLRDQPLPGVPAWYTDGSSFIMDGRRQAGAAIVDNKRTVWASNLPEGTSAQKAELIALTQALRLAEGKSINIYTDSRYAFATAHVHGAIYKQRGWLTSAGKDIKNKEEILALLEAIHLPKRVAIIHCPGHQRGTDPVATGNRKADEAAKQAAQSTRILTETTKNAGKRTADGSEFEKRTADGSEFESPKKKAKVE

SEQ ID NO: 7635 - protein, 2218 aa, synthetic construct
MPAAKRVKLDGGDKKYSIGLDIGTNSVGWAVITDEYKVPSKKFKVLGNTDRHSIKKNLIGALLFDSGETAEATRLKRTARRRYTRRKNRICYLQEIFSNEMAKVDDSFFHRLEESFLVEEDKKHERHPIFGNIVDEVAYHEKYPTIYHLRKKLVDSTDKADLRLIYLALAHMIKFRGHFLIEGDLNPDNSDVDKLFIQLVQTYNQLFEENPINASGVDAKAILSARLSKSRRLENLIAQLPGEKKNGLFGNLIALSLGLTPNFKSNFDLAEDAKLQLSKDTYDDDLDNLLAQIGDQYADLFLAAKNLSDAILLSDILRVNTEITKAPLSASMIKRYDEHHQDLTLLKALVRQQLPEKYKEIFFDQSKNGYAGYIDGGASQEEFYKFIKPILEKMDGTEELLVKLNREDLLRKQRTFDNGSIPHQIHLGELHAILRRQEDFYPFLKDNREKIEKILTFRIPYYVGPLARGNSRFAWMTRKSEETITPWNFEEVVDKGASAQSFIERMTNFDKNLPNEKVLPKHSLLYEYFTVYNELTKVKYVTEGMRKPAFLSGEQKKAIVDLLFKTNRKVTVKQLKEDYFKKIECFDSVEISGVEDRFNASLGTYHDLLKIIKDKDFLDNEENEDILEDIVLTLTLFEDREMIEERLKTYAHLFDDKVMKQLKRRRYTGWGRLSRKLINGIRDKQSGKTILDFLKSDGFANRNFMQLIHDDSLTFKEDIQKAQVSGQGDSLHEHIANLAGSPAIKKGILQTVKVVDELVKVMGRHKPENIVIEMARENQTTQKGQKNSRERMKRIEEGIKELGSQILKEHPVENTQLQNEKLYLYYLQNGRDMYVDQELDINRLSDYDVDHIVPQSFLKDDSIDNKVLTRSDKARGKSDNVPSEEVVKKMKNYWRQLLNAKLITQRKFDNLTKAERGGLSELDKAGFIKRQLVETRQITKHVAQILDSRMNTKYDENDKLIREVKVITLKSKLVSDFRKDFQFYKVREINNYHHAHDAYLNAVVGTALIKKYPKLESEFVYGDYKVYDVRKMIAKSEQEIGKATAKYFFYSNIMNFFKTEITLANGEIRKRPLIETNGETGEIVWDKGRDFATVRKVLSMPQVNIVKKTEVQTGGFSKESILPKRNSDKLIARKKDWDPKKYGGFDSPTVAYSVLVVAKVEKGKSKKLKSVKELLGITIMERSSFEKNPIDFLEAKGYKEVKKDLIIKLPKYSLFELENGRKRMLASAGELQKGNELALPSKYVNFLYLASHYEKLKGSPEDNEQKQLFVEQHKHYLDEIIEQISEFSKRVILADANLDKVLSAYNKHRDKPIREQAENIIHLFTLTNLGAPAAFKYFDTTIDRKRYTSTKEVLDATLIHQSITGLYETRIDLSQLGGDGGPAPGSSEAAAKGGTLGDQGSRGSDPLPEPRVTLTVEGIPTEFLVNTGAEHSVLTKPMGKMGSKRTVVAGATGSKVYPWTTKRLLKIGQKQVTHSFLVIPECPAPLLGRDLLTKLKAQIQFSTEGPQVTWEDRPAMCLVLNLEEEYRLHEKPVPPSIDPSWLQLFPMVWAEKAGMGLANQVPPVVVELKSDASPVAVRQYPMSKEAREGIRPHIQRFLDLGILVPCQSPWNTPLLPVKKPGTNDYRPVQDLREVNKRVQDIHPTVPNPYNLLSSLPPSHTWYSVLDLKDAFFCLKLHPNSQPLFAFEWRDPEKGNTGQLTWTRLPQGFKNSPTLFNEALHRDLASFRALNPQVVMLQYVDDLLVAAPTYRDCKEGTRRLLQELSKLGYRVSAKKAQLCREEVTYLGYLLKGGKRWLTPARKATVMKIPTPTTPRQVREFLGKAGFCRLFIPGFASLAAPLYPLTRPKVPFTWTEAHQEAFGRIKEALLSAPALALPDLTKPFALYVDEKEGVARGVLTQTLGPWRRPVAYLSKKLDPVASGWPTCLKAIAAVALLLKDADKLTLGQNVLVIAPHNLESIVRQPPDRWMTNARMTHYQSLLLNERVSFAPPAILNPATLLPVESDDTPIHICSEILAEETGTRPDLRDQPLPGVPAWYTDGSSFIMDGRRQAGAAIVDNKRTVWASNLPEGTSAQKAELIALTQALRLAEGKSINIYTDSRYAFATAHVHGAIYKQRGWLTSAGKDIKNKEEILALLEAIHLPKRVAIIHCPGHQRGTDPVATGNRKADEAAKQAAQSTRILTETTKNAGKRTADGSEFEKRTADGSEFESPKKKAKVE

SEQ ID NO: 7636 - protein, 2096 aa, synthetic construct
MPAAKRVKLDGGDKKYSIGLDIGTNSVGWAVITDEYKVPSKKFKVLGNTDRHSIKKNLIGALLFDSGETAEATRLKRTARRRYTRRKNRICYLQEIFSNEMAKVDDSFFHRLEESFLVEEDKKHERHPIFGNIVDEVAYHEKYPTIYHLRKKLVDSTDKADLRLIYLALAHMIKFRGHFLIEGDLNPDNSDVDKLFIQLVQTYNQLFEENPINASGVDAKAILSARLSKSRRLENLIAQLPGEKKNGLFGNLIALSLGLTPNFKSNFDLAEDAKLQLSKDTYDDDLDNLLAQIGDQYADLFLAAKNLSDAILLSDILRVNTEITKAPLSASMIKRYDEHHQDLTLLKALVRQQLPEKYKEIFFDQSKNGYAGYIDGGASQEEFYKFIKPILEKMDGTEELLVKLNREDLLRKQRTFDNGSIPHQIHLGELHAILRRQEDFYPFLKDNREKIEKILTFRIPYYVGPLARGNSRFAWMTRKSEETITPWNFEEVVDKGASAQSFIERMTNFDKNLPNEKVLPKHSLLYEYFTVYNELTKVKYVTEGMRKPAFLSGEQKKAIVDLLFKTNRKVTVKQLKEDYFKKIECFDSVEISGVEDRFNASLGTYHDLLKIIKDKDFLDNEENEDILEDIVLTLTLFEDREMIEERLKTYAHLFDDKVMKQLKRRRYTGWGRLSRKLINGIRDKQSGKTILDFLKSDGFANRNFMQLIHDDSLTFKEDIQKAQVSGQGDSLHEHIANLAGSPAIKKGILQTVKVVDELVKVMGRHKPENIVIEMARENQTTQKGQKNSRERMKRIEEGIKELGSQILKEHPVENTQLQNEKLYLYYLQNGRDMYVDQELDINRLSDYDVDHIVPQSFLKDDSIDNKVLTRSDKARGKSDNVPSEEVVKKMKNYWRQLLNAKLITQRKFDNLTKAERGGLSELDKAGFIKRQLVETRQITKHVAQILDSRMNTKYDENDKLIREVKVITLKSKLVSDFRKDFQFYKVREINNYHHAHDAYLNAVVGTALIKKYPKLESEFVYGDYKVYDVRKMIAKSEQEIGKATAKYFFYSNIMNFFKTEITLANGEIRKRPLIETNGETGEIVWDKGRDFATVRKVLSMPQVNIVKKTEVQTGGFSKESILPKRNSDKLIARKKDWDPKKYGGFDSPTVAYSVLVVAKVEKGKSKKLKSVKELLGITIMERSSFEKNPIDFLEAKGYKEVKKDLIIKLPKYSLFELENGRKRMLASAGELQKGNELALPSKYVNFLYLASHYEKLKGSPEDNEQKQLFVEQHKHYLDEIIEQISEFSKRVILADANLDKVLSAYNKHRDKPIREQAENIIHLFTLTNLGAPAAFKYFDTTIDRKRYTSTKEVLDATLIHQSITGLYETRIDLSQLGGDGGPAPGSSEAAAKGGTLGIEDEYRLHETSTEPDVSLGSTWLSDFPQAWAETGGMGLAVRQAPLIIPLKATSTPVSIQQYPMSHEARLGIKPHIQRLLDQGILVPCQSPWNTPLLPVKKPGTNDYRPVQDLREVNKRVEDIHPTVPNPYNLLSGLPPSHQWYTVLDLKDAFFCLRLHPTSQPLFAFEWRDPGMGISGQLTWTRLPQGFKNSPTLFNEALHRDLADFRIQHPDLILLQYVDDILLAATSELDCQQGTRALLQTLGDLGYRASAKKAQICQKQVKYLGYLLREGQRWLTEARKETVMGQPVPKTPRQLREFLGTAGFCRLWIPGFAEMAAPLYPLTKPGTLFSWGPDQQKAYQEIKQALLTAPALGLPDLTKPFELFVDEKQGYAKGVLTQKLGPWRRPVAYLSKKLDPVAAGWPPCLRMVAAIAVLTKDAGKLTMGQPLVILAPHAVEALVKQPPDRWLSNARMTHYQAMLLDTDRVQFGPVVALNPATLLPLPEEGAPHDCLEILAETHGTRPDLTDQPIPDADHTWYTDGSSFLQEGQRKAGAAVTTETEVIWAGALPAGTSAQRAELIALTQALKMAEGKRLNVYTDSRYAFATAHIHGEIYRRRGWLTSEGREIKNKSEILALLKALFLPKRLSIIHCLGHQKGDSAEARGNRLADQAAREAAIKTPPDTSTLLAGKRTADGSEFEKRTADGSEFESPKKKAKVE

SEQ ID NO: 7637 - protein, 2096 aa, synthetic construct
MPAAKRVKLDGGDKKYSIGLDIGTNSVGWAVITDEYKVPSKKFKVLGNTDRHSIKKNLIGALLFDSGETAEATRLKRTARRRYTRRKNRICYLQEIFSNEMAKVDDSFFHRLEESFLVEEDKKHERHPIFGNIVDEVAYHEKYPTIYHLRKKLVDSTDKADLRLIYLALAHMIKFRGHFLIEGDLNPDNSDVDKLFIQLVQTYNQLFEENPINASGVDAKAILSARLSKSRRLENLIAQLPGEKKNGLFGNLIALSLGLTPNFKSNFDLAEDAKLQLSKDTYDDDLDNLLAQIGDQYADLFLAAKNLSDAILLSDILRVNTEITKAPLSASMIKRYDEHHQDLTLLKALVRQQLPEKYKEIFFDQSKNGYAGYIDGGASQEEFYKFIKPILEKMDGTEELLVKLNREDLLRKQRTFDNGSIPHQIHLGELHAILRRQEDFYPFLKDNREKIEKILTFRIPYYVGPLARGNSRFAWMTRKSEETITPWNFEEVVDKGASAQSFIERMTNFDKNLPNEKVLPKHSLLYEYFTVYNELTKVKYVTEGMRKPAFLSGEQKKAIVDLLFKTNRKVTVKQLKEDYFKKIECFDSVEISGVEDRFNASLGTYHDLLKIIKDKDFLDNEENEDILEDIVLTLTLFEDREMIEERLKTYAHLFDDKVMKQLKRRRYTGWGRLSRKLINGIRDKQSGKTILDFLKSDGFANRNFMQLIHDDSLTFKEDIQKAQVSGQGDSLHEHIANLAGSPAIKKGILQTVKVVDELVKVMGRHKPENIVIEMARENQTTQKGQKNSRERMKRIEEGIKELGSQILKEHPVENTQLQNEKLYLYYLQNGRDMYVDQELDINRLSDYDVDHIVPQSFLKDDSIDNKVLTRSDKARGKSDNVPSEEVVKKMKNYWRQLLNAKLITQRKFDNLTKAERGGLSELDKAGFIKRQLVETRQITKHVAQILDSRMNTKYDENDKLIREVKVITLKSKLVSDFRKDFQFYKVREINNYHHAHDAYLNAVVGTALIKKYPKLESEFVYGDYKVYDVRKMIAKSEQEIGKATAKYFFYSNIMNFFKTEITLANGEIRKRPLIETNGETGEIVWDKGRDFATVRKVLSMPQVNIVKKTEVQTGGFSKESILPKRNSDKLIARKKDWDPKKYGGFDSPTVAYSVLVVAKVEKGKSKKLKSVKELLGITIMERSSFEKNPIDFLEAKGYKEVKKDLIIKLPKYSLFELENGRKRMLASAGELQKGNELALPSKYVNFLYLASHYEKLKGSPEDNEQKQLFVEQHKHYLDEIIEQISEFSKRVILADANLDKVLSAYNKHRDKPIREQAENIIHLFTLTNLGAPAAFKYFDTTIDRKRYTSTKEVLDATLIHQSITGLYETRIDLSQLGGDGGPAPGSSEAAAKGGTLNIEDEYRLHETSKEPDVSLGSTWLSDFPQAWAETGGMGLAVRQAPLIIPLKATSTPVSIKQYPMSQEARLGIKPHIQRLLDQGILVPCQSPWNTPLLPVKKPGTNDYRPVQDLREVNKRVEDIHPTVPNPYNLLSGLPPSHQWYTVLDLKDAFFCLRLHPTSQPLFAFEWRDPEMGISGQLTWTRLPQGFKNSPTLFDEALHRDLAGFRIQHPDLILLQYVDDLLLAATSELDCQQGTRALLQTLGDLGYRASAKKAQICQKQVKYLGYLLKEGQRWLTEARKETVMGQPIPKTPRQLREFLGTAGFCRLWIPGFAEMAAPLYPLTKTGTLFNWGPDQQKAFQEIKQALLTAPALGLPDLTKPFELFVDEKQGYAKGVLTQKLGPWRRPVAYLSKKLDPVAAGWPPCLRMVAAIAVLTKDAGKLTMGQPLVILAPHAVEALVKQPPDRWLSNARMTHYQALLLDTDRVQFGPVVALNPATLLPLPEEGLQHDCLDILAEAHGTRSDLMDQPLPDADHTWYTDGSSFLQEGQRKAGAAVTTETEVIWARALPAGTSAQRAELIALTQALKMAEGKKLNVYTDSRYAFATAHIHGEIYRRRGLLTSEGKEIKNKDEILALLKALFLPKRLSIIHCPGHQKGNSAEARGNRMADQAAREVATRETPETSTLLAGKRTADGSEFEKRTADGSEFESPKKKAKVE

SEQ ID NO: 7638 - protein, 2096 aa, synthetic construct
MPAAKRVKLDGGDKKYSIGLDIGTNSVGWAVITDEYKVPSKKFKVLGNTDRHSIKKNLIGALLFDSGETAEATRLKRTARRRYTRRKNRICYLQEIFSNEMAKVDDSFFHRLEESFLVEEDKKHERHPIFGNIVDEVAYHEKYPTIYHLRKKLVDSTDKADLRLIYLALAHMIKFRGHFLIEGDLNPDNSDVDKLFIQLVQTYNQLFEENPINASGVDAKAILSARLSKSRRLENLIAQLPGEKKNGLFGNLIALSLGLTPNFKSNFDLAEDAKLQLSKDTYDDDLDNLLAQIGDQYADLFLAAKNLSDAILLSDILRVNTEITKAPLSASMIKRYDEHHQDLTLLKALVRQQLPEKYKEIFFDQSKNGYAGYIDGGASQEEFYKFIKPILEKMDGTEELLVKLNREDLLRKQRTFDNGSIPHQIHLGELHAILRRQEDFYPFLKDNREKIEKILTFRIPYYVGPLARGNSRFAWMTRKSEETITPWNFEEVVDKGASAQSFIERMTNFDKNLPNEKVLPKHSLLYEYFTVYNELTKVKYVTEGMRKPAFLSGEQKKAIVDLLFKTNRKVTVKQLKEDYFKKIECFDSVEISGVEDRFNASLGTYHDLLKIIKDKDFLDNEENEDILEDIVLTLTLFEDREMIEERLKTYAHLFDDKVMKQLKRRRYTGWGRLSRKLINGIRDKQSGKTILDFLKSDGFANRNFMQLIHDDSLTFKEDIQKAQVSGQGDSLHEHIANLAGSPAIKKGILQTVKVVDELVKVMGRHKPENIVIEMARENQTTQKGQKNSRERMKRIEEGIKELGSQILKEHPVENTQLQNEKLYLYYLQNGRDMYVDQELDINRLSDYDVDHIVPQSFLKDDSIDNKVLTRSDKARGKSDNVPSEEVVKKMKNYWRQLLNAKLITQRKFDNLTKAERGGLSELDKAGFIKRQLVETRQITKHVAQILDSRMNTKYDENDKLIREVKVITLKSKLVSDFRKDFQFYKVREINNYHHAHDAYLNAVVGTALIKKYPKLESEFVYGDYKVYDVRKMIAKSEQEIGKATAKYFFYSNIMNFFKTEITLANGEIRKRPLIETNGETGEIVWDKGRDFATVRKVLSMPQVNIVKKTEVQTGGFSKESILPKRNSDKLIARKKDWDPKKYGGFDSPTVAYSVLVVAKVEKGKSKKLKSVKELLGITIMERSSFEKNPIDFLEAKGYKEVKKDLIIKLPKYSLFELENGRKRMLASAGELQKGNELALPSKYVNFLYLASHYEKLKGSPEDNEQKQLFVEQHKHYLDEIIEQISEFSKRVILADANLDKVLSAYNKHRDKPIREQAENIIHLFTLTNLGAPAAFKYFDTTIDRKRYTSTKEVLDATLIHQSITGLYETRIDLSQLGGDGGPAPGSSEAAAKGGTLNIEDEHRLHETSKEPDVSLGSTWLSDFPQAWAETGGMGLAVRQAPLIIPLKATSTPVSIKQYPMSQEARLGIKPHIQRLLDQGILVPCQSPWNTPLLPVKKPGTNDYRPVQDLREVNKRVEDIHPTVPNPYNLLSGLPPSHQWYTVLDLKDAFFCLRLHPTSQPLFAFEWRDPEMGISGQLTWTRLPQGFKNSPTLFDEALHRDLADFRIQHPDLILLQYVDDLLLAATSELDCQQGTRALLQTLGNLGYRASAKKAQICQKQVKYLGYLLKEGQRWLTEARKETVMGQPTPKTPRQLREFLGTAGFCRLWIPGFAEMAAPLYPLTKTGTLFNWGPDQQKAYQEIKQALLTAPALGLPDLTKPFELFVDEKQGYAKGVLTQKLGPWRRPVAYLSKKLDPVAAGWPPCLRMVAAIAVLTKDAGKLTMGQPLVILAPHAVEALVKQPPDRWLSNARMTHYQALLLDTDRVQFGPVVALNPATLLPLPEEGLQHNCLDILAEAHGTRPDLTDQPLPDADHTWYTDGSSLLQEGQRKAGAAVTTETEVIWAKALPAGTSAQRAELIALTQALKMAEGKKLNVYTDSRYAFATAHIHGEIYRRRGLLTSEGKEIKNKDEILALLKALFLPKRLSIIHCPGHQKGHSAEARGNRMADQAARKAAITETPDTSTLLAGKRTADGSEFEKRTADGSEFESPKKKAKVE

SEQ ID NO: 7639 - protein, 2096 aa, synthetic construct
MPAAKRVKLDGGDKKYSIGLDIGTNSVGWAVITDEYKVPSKKFKVLGNTDRHSIKKNLIGALLFDSGETAEATRLKRTARRRYTRRKNRICYLQEIFSNEMAKVDDSFFHRLEESFLVEEDKKHERHPIFGNIVDEVAYHEKYPTIYHLRKKLVDSTDKADLRLIYLALAHMIKFRGHFLIEGDLNPDNSDVDKLFIQLVQTYNQLFEENPINASGVDAKAILSARLSKSRRLENLIAQLPGEKKNGLFGNLIALSLGLTPNFKSNFDLAEDAKLQLSKDTYDDDLDNLLAQIGDQYADLFLAAKNLSDAILLSDILRVNTEITKAPLSASMIKRYDEHHQDLTLLKALVRQQLPEKYKEIFFDQSKNGYAGYIDGGASQEEFYKFIKPILEKMDGTEELLVKLNREDLLRKQRTFDNGSIPHQIHLGELHAILRRQEDFYPFLKDNREKIEKILTFRIPYYVGPLARGNSRFAWMTRKSEETITPWNFEEVVDKGASAQSFIERMTNFDKNLPNEKVLPKHSLLYEYFTVYNELTKVKYVTEGMRKPAFLSGEQKKAIVDLLFKTNRKVTVKQLKEDYFKKIECFDSVEISGVEDRFNASLGTYHDLLKIIKDKDFLDNEENEDILEDIVLTLTLFEDREMIEERLKTYAHLFDDKVMKQLKRRRYTGWGRLSRKLINGIRDKQSGKTILDFLKSDGFANRNFMQLIHDDSLTFKEDIQKAQVSGQGDSLHEHIANLAGSPAIKKGILQTVKVVDELVKVMGRHKPENIVIEMARENQTTQKGQKNSRERMKRIEEGIKELGSQILKEHPVENTQLQNEKLYLYYLQNGRDMYVDQELDINRLSDYDVDHIVPQSFLKDDSIDNKVLTRSDKARGKSDNVPSEEVVKKMKNYWRQLLNAKLITQRKFDNLTKAERGGLSELDKAGFIKRQLVETRQITKHVAQILDSRMNTKYDENDKLIREVKVITLKSKLVSDFRKDFQFYKVREINNYHHAHDAYLNAVVGTALIKKYPKLESEFVYGDYKVYDVRKMIAKSEQEIGKATAKYFFYSNIMNFFKTEITLANGEIRKRPLIETNGETGEIVWDKGRDFATVRKVLSMPQVNIVKKTEVQTGGFSKESILPKRNSDKLIARKKDWDPKKYGGFDSPTVAYSVLVVAKVEKGKSKKLKSVKELLGITIMERSSFEKNPIDFLEAKGYKEVKKDLIIKLPKYSLFELENGRKRMLASAGELQKGNELALPSKYVNFLYLASHYEKLKGSPEDNEQKQLFVEQHKHYLDEIIEQISEFSKRVILADANLDKVLSAYNKHRDKPIREQAENIIHLFTLTNLGAPAAFKYFDTTIDRKRYTSTKEVLDATLIHQSITGLYETRIDLSQLGGDGGPAPGSSEAAAKGGTLNIEDEYRLHETSKEPDVPLGSTWLSDFPQAWAETGGMGLAVRQAPLIIPLKATSTPVSIKQYPMSQEARLGIKPHIQRLLDQGILVPCQSPWNTPLLPVKKPGTNDYRPVQDLREVNKRVEDIHPTVPNPYNLLSGLPPSHQWYTVLDLKDAFFCLRLHPTSQPLFAFEWRDPEMGISGQLTWTRLPQGFKNSPTLFNEALHRDLADFRIQHPDLILLQYVDDLLLAATSEQDCQRGTRALLQTLGNLGYRASAKKAQICQKQVKYLGYLLKEGQRWLTEARKETVMGQPTPKTPRQLREFLGKAGFCRLFIPGFAEMAAPLYPLTKPGTLFNWGPDQQKAYQEIKQALLTAPALGLPDLTKPFELFVDEKQGYAKGVLTQKLGPWRRPVAYLSKKLDPVAAGWPPCLRMVAAIAVLTKDAGKLTMGQPLVILAPHAVEALVKQPPDRWLSNARMTHYQAMLLDTDRVQFGPVVALNPATLLPLPEKEAPHDCLEILAETHGTRPDLTDQPIPDADYTWYTDGSSFLQEGQRRAGAAVTTETEVIWARALPAGTSAQRAELIALTQALKMAEGKKLNVYTDSRYAFATAHVHGEIYRRRGWLTSEGREIKNKNEILALLKALFLPKRLSIIHCPGHQKGNSAEARGNRMADQAAREAAMKAVLETSTLLAGKRTADGSEFEKRTADGSEFESPKKKAKVE

SEQ ID NO: 7640 - protein, 2102 aa, synthetic construct
MPAAKRVKLDGGDKKYSIGLDIGTNSVGWAVITDEYKVPSKKFKVLGNTDRHSIKKNLIGALLFDSGETAEATRLKRTARRRYTRRKNRICYLQEIFSNEMAKVDDSFFHRLEESFLVEEDKKHERHPIFGNIVDEVAYHEKYPTIYHLRKKLVDSTDKADLRLIYLALAHMIKFRGHFLIEGDLNPDNSDVDKLFIQLVQTYNQLFEENPINASGVDAKAILSARLSKSRRLENLIAQLPGEKKNGLFGNLIALSLGLTPNFKSNFDLAEDAKLQLSKDTYDDDLDNLLAQIGDQYADLFLAAKNLSDAILLSDILRVNTEITKAPLSASMIKRYDEHHQDLTLLKALVRQQLPEKYKEIFFDQSKNGYAGYIDGGASQEEFYKFIKPILEKMDGTEELLVKLNREDLLRKQRTFDNGSIPHQIHLGELHAILRRQEDFYPFLKDNREKIEKILTFRIPYYVGPLARGNSRFAWMTRKSEETITPWNFEEVVDKGASAQSFIERMTNFDKNLPNEKVLPKHSLLYEYFTVYNELTKVKYVTEGMRKPAFLSGEQKKAIVDLLFKTNRKVTVKQLKEDYFKKIECFDSVEISGVEDRFNASLGTYHDLLKIIKDKDFLDNEENEDILEDIVLTLTLFEDREMIEERLKTYAHLFDDKVMKQLKRRRYTGWGRLSRKLINGIRDKQSGKTILDFLKSDGFANRNFMQLIHDDSLTFKEDIQKAQVSGQGDSLHEHIANLAGSPAIKKGILQTVKVVDELVKVMGRHKPENIVIEMARENQTTQKGQKNSRERMKRIEEGIKELGSQILKEHPVENTQLQNEKLYLYYLQNGRDMYVDQELDINRLSDYDVDHIVPQSFLKDDSIDNKVLTRSDKARGKSDNVPSEEVVKKMKNYWRQLLNAKLITQRKFDNLTKAERGGLSELDKAGFIKRQLVETRQITKHVAQILDSRMNTKYDENDKLIREVKVITLKSKLVSDFRKDFQFYKVREINNYHHAHDAYLNAVVGTALIKKYPKLESEFVYGDYKVYDVRKMIAKSEQEIGKATAKYFFYSNIMNFFKTEITLANGEIRKRPLIETNGETGEIVWDKGRDFATVRKVLSMPQVNIVKKTEVQTGGFSKESILPKRNSDKLIARKKDWDPKKYGGFDSPTVAYSVLVVAKVEKGKSKKLKSVKELLGITIMERSSFEKNPIDFLEAKGYKEVKKDLIIKLPKYSLFELENGRKRMLASAGELQKGNELALPSKYVNFLYLASHYEKLKGSPEDNEQKQLFVEQHKHYLDEIIEQISEFSKRVILADANLDKVLSAYNKHRDKPIREQAENIIHLFTLTNLGAPAAFKYFDTTIDRKRYTSTKEVLDATLIHQSITGLYETRIDLSQLGGDGGPAPEAAAKGSSGGTVSLQDEHRLFDIPVTTSLPDVWLQDFPQAWAETGGLGRAKCQAPIIIDLKPTAVPVSIKQYPMSLEAHMGIRQHIIKFLELGVLRPCRSPWNTPLLPVKKPGTQDYRPVQDLREINKRTVDIHPTVPNPYNLLSTLKPDYSWYTVLDLKDAFFCLPLAPQSQELFAFEWKDPERGISGQLTWTRLPQGFKNSPTLFDEALHRDLTDFRTQHPEVTLLQYVDDLLLAAPTKKACTQGTRHLLQELGEKGYRASAKKAQICQTKVTYLGYILSEGKRWLTPGRIETVARIPPPRNPREVREFLGTAGFCRLWIPGFAELAAPLYALTKESTPFTWQTEHQLAFEALKKALLSAPALGLPDTSKPFTLFLDERQGIAKGVLTQKLGPWKRPVAYLSKKLDPVAAGWPPCLRIMAATAMLVKDSAKLTLGQPLTVITPHTLEAIVRQPPDRWITNARLTHYQALLLDTDRVQFGPPVTLNPATLLPVPENQPSPHDCRQVLAETHGTREDLKDQELPDADHTWYTDGSSYLDSGTRRAGAAVVDGHNTIWAQSLPPGTSAQKAELIALTKALELSKGKKANIYTDSRYAFATAHTHGSIYERRGLLTSEGKEIKNKAEIIALLKALFLPQEVAIIHCPGHQKGQDPVAVGNRQADRVARQAAMAEVLTLATEPDNTSHITAGKRTADGSEFEKRTADGSEFESPKKKAKVE

SEQ ID NO: 7641 - protein, 2095 aa, synthetic construct
MPAAKRVKLDGGDKKYSIGLDIGTNSVGWAVITDEYKVPSKKFKVLGNTDRHSIKKNLIGALLFDSGETAEATRLKRTARRRYTRRKNRICYLQEIFSNEMAKVDDSFFHRLEESFLVEEDKKHERHPIFGNIVDEVAYHEKYPTIYHLRKKLVDSTDKADLRLIYLALAHMIKFRGHFLIEGDLNPDNSDVDKLFIQLVQTYNQLFEENPINASGVDAKAILSARLSKSRRLENLIAQLPGEKKNGLFGNLIALSLGLTPNFKSNFDLAEDAKLQLSKDTYDDDLDNLLAQIGDQYADLFLAAKNLSDAILLSDILRVNTEITKAPLSASMIKRYDEHHQDLTLLKALVRQQLPEKYKEIFFDQSKNGYAGYIDGGASQEEFYKFIKPILEKMDGTEELLVKLNREDLLRKQRTFDNGSIPHQIHLGELHAILRRQEDFYPFLKDNREKIEKILTFRIPYYVGPLARGNSRFAWMTRKSEETITPWNFEEVVDKGASAQSFIERMTNFDKNLPNEKVLPKHSLLYEYFTVYNELTKVKYVTEGMRKPAFLSGEQKKAIVDLLFKTNRKVTVKQLKEDYFKKIECFDSVEISGVEDRFNASLGTYHDLLKIIKDKDFLDNEENEDILEDIVLTLTLFEDREMIEERLKTYAHLFDDKVMKQLKRRRYTGWGRLSRKLINGIRDKQSGKTILDFLKSDGFANRNFMQLIHDDSLTFKEDIQKAQVSGQGDSLHEHIANLAGSPAIKKGILQTVKVVDELVKVMGRHKPENIVIEMARENQTTQKGQKNSRERMKRIEEGIKELGSQILKEHPVENTQLQNEKLYLYYLQNGRDMYVDQELDINRLSDYDVDHIVPQSFLKDDSIDNKVLTRSDKARGKSDNVPSEEVVKKMKNYWRQLLNAKLITQRKFDNLTKAERGGLSELDKAGFIKRQLVETRQITKHVAQILDSRMNTKYDENDKLIREVKVITLKSKLVSDFRKDFQFYKVREINNYHHAHDAYLNAVVGTALIKKYPKLESEFVYGDYKVYDVRKMIAKSEQEIGKATAKYFFYSNIMNFFKTEITLANGEIRKRPLIETNGETGEIVWDKGRDFATVRKVLSMPQVNIVKKTEVQTGGFSKESILPKRNSDKLIARKKDWDPKKYGGFDSPTVAYSVLVVAKVEKGKSKKLKSVKELLGITIMERSSFEKNPIDFLEAKGYKEVKKDLIIKLPKYSLFELENGRKRMLASAGELQKGNELALPSKYVNFLYLASHYEKLKGSPEDNEQKQLFVEQHKHYLDEIIEQISEFSKRVILADANLDKVLSAYNKHRDKPIREQAENIIHLFTLTNLGAPAAFKYFDTTIDRKRYTSTKEVLDATLIHQSITGLYETRIDLSQLGGDGGPAPEAAAKGSSGGTLQLEEEYRLFEPESTQKQEMDIWLKNFPQAWAETGGMGTAHCQAPVLIQLKATATPISIRQYPMPHEAYQGIKPHIRRMLDQGILKPCQSPWNTPLLPVKKPGTEDYRPVQDLREVNKRVEDIHPTVPNPYNLLSTLPPSHPWYTVLDLKDAFFCLRLHSESQLLFAFEWRDPEIGLSGQLTWTRLPQGFKNSPTLFNEALHSDLADFRVRYPALVLLQYVDDLLLAAATRTECLEGTKALLETLGNKGYRASAKKAQICLQEVTYLGYSLKDGQRWLTKARKEAILSIPVPKNSRQVREFLGTAGYCRLWIPGFAELAAPLYPLTRPGTLFQWGTEQQLAFEDIKKALLSSPALGLPDITKPFELFIDENSGFAKGVLVQKLGPWKRPVAYLSKKLDTVASGWPPCLRMVAAIAILVKDAGKLTLGQPLTILTSHPVEALVRQPPNKWLSNARMTHYQAMLLDAERVHFGPTVSLNPATLLPLPSGGNHHDCLQILAETHGTRPDLTDQPLPDADLTWYTDGSSFIRNGEREAGAAVTTESEVIWAAPLPPGTSAQRAELIALTQALKMAEGKKLTVYTDSRYAFATTHVHGEIYRRRGWLTSEGKEIKNKNEILALLEALFLPKRLSIIHCPGHQKGDSPQAKGNRLADDTAKKAATETHSSLTVLPAGKRTADGSEFEKRTADGSEFESPKKKAKVE

SEQ ID NO: 7642 - protein, 2176 aa, synthetic construct
MPAAKRVKLDGGDKKYSIGLDIGTNSVGWAVITDEYKVPSKKFKVLGNTDRHSIKKNLIGALLFDSGETAEATRLKRTARRRYTRRKNRICYLQEIFSNEMAKVDDSFFHRLEESFLVEEDKKHERHPIFGNIVDEVAYHEKYPTIYHLRKKLVDSTDKADLRLIYLALAHMIKFRGHFLIEGDLNPDNSDVDKLFIQLVQTYNQLFEENPINASGVDAKAILSARLSKSRRLENLIAQLPGEKKNGLFGNLIALSLGLTPNFKSNFDLAEDAKLQLSKDTYDDDLDNLLAQIGDQYADLFLAAKNLSDAILLSDILRVNTEITKAPLSASMIKRYDEHHQDLTLLKALVRQQLPEKYKEIFFDQSKNGYAGYIDGGASQEEFYKFIKPILEKMDGTEELLVKLNREDLLRKQRTFDNGSIPHQIHLGELHAILRRQEDFYPFLKDNREKIEKILTFRIPYYVGPLARGNSRFAWMTRKSEETITPWNFEEVVDKGASAQSFIERMTNFDKNLPNEKVLPKHSLLYEYFTVYNELTKVKYVTEGMRKPAFLSGEQKKAIVDLLFKTNRKVTVKQLKEDYFKKIECFDSVEISGVEDRFNASLGTYHDLLKIIKDKDFLDNEENEDILEDIVLTLTLFEDREMIEERLKTYAHLFDDKVMKQLKRRRYTGWGRLSRKLINGIRDKQSGKTILDFLKSDGFANRNFMQLIHDDSLTFKEDIQKAQVSGQGDSLHEHIANLAGSPAIKKGILQTVKVVDELVKVMGRHKPENIVIEMARENQTTQKGQKNSRERMKRIEEGIKELGSQILKEHPVENTQLQNEKLYLYYLQNGRDMYVDQELDINRLSDYDVDHIVPQSFLKDDSIDNKVLTRSDKARGKSDNVPSEEVVKKMKNYWRQLLNAKLITQRKFDNLTKAERGGLSELDKAGFIKRQLVETRQITKHVAQILDSRMNTKYDENDKLIREVKVITLKSKLVSDFRKDFQFYKVREINNYHHAHDAYLNAVVGTALIKKYPKLESEFVYGDYKVYDVRKMIAKSEQEIGKATAKYFFYSNIMNFFKTEITLANGEIRKRPLIETNGETGEIVWDKGRDFATVRKVLSMPQVNIVKKTEVQTGGFSKESILPKRNSDKLIARKKDWDPKKYGGFDSPTVAYSVLVVAKVEKGKSKKLKSVKELLGITIMERSSFEKNPIDFLEAKGYKEVKKDLIIKLPKYSLFELENGRKRMLASAGELQKGNELALPSKYVNFLYLASHYEKLKGSPEDNEQKQLFVEQHKHYLDEIIEQISEFSKRVILADANLDKVLSAYNKHRDKPIREQAENIIHLFTLTNLGAPAAFKYFDTTIDRKRYTSTKEVLDATLIHQSITGLYETRIDLSQLGGDGGPAPEAAAKGSSGGMNPLQLLQPLPAEIKGTKLLAHWNSGATITCIPESFLEDEQPIKKTLIKTIHGEKQQNVYYVTFKVKGRKVEAEVIASPYEYILLSPTDVPWLTQQPLQLTILVPLQEYQEKILSKTALPEDQKQQLKTLFVKYDNLWQHWENQVGHRKIRPHNIATGDYPPRPQKQYPINPKAKPSIQIVIDDLLKQGVLTPQNSTMNTPVYPVPKPDGRWRMVLDYREVNKTIPLTAAQNQHSAGILATIVRQKYKTTLDLANGFWAHPITPESYWLTAFTWQGKQYCWTRLPQGFLNSPALFNADVVDLLKEIPNVQVYVDDIYLSHDDPKEHVQQLEKVFQILLQAGYVVSLKKSEIGQKTVEFLGFNITKEGRGLTDTFKTKLLNITPPKDLKQLQSILGLLNFARNFIPNFAELVQPLYNLIAPAKGKYIEWSEENTKQLNMVIEALNTASNLEERLPEQRLVIKVNTSPSAGYVRYYNETGKKPIMYLNYVFSKAELKFSMLEKLLTTMHKALIKAMDLAMGQEILVYSPIVSMTKIQKTPLPERKALPIRWITWMTYLEDPRIQFHYDKTLPELKHIPDVYTSSQSPVKHPSQYEGVFYTDGSAIKSPDPTKSNNAGMGIVHATYKPEYQVLNQWSIPLGNHTAQMAEIAAVEFACKKALKIPGPVLVITDSFYVAESANKELPYWKSNGFVNNKKKPLKHISKWKSIAECLSMKPDITIQHEKGISLQIPVFILKGNALADKLATQGSYVVNAGKRTADGSEFEKRTADGSEFESPKKKAKVE

SEQ ID NO: 7643 - protein, 2096 aa, synthetic construct
MPAAKRVKLDGGDKKYSIGLDIGTNSVGWAVITDEYKVPSKKFKVLGNTDRHSIKKNLIGALLFDSGETAEATRLKRTARRRYTRRKNRICYLQEIFSNEMAKVDDSFFHRLEESFLVEEDKKHERHPIFGNIVDEVAYHEKYPTIYHLRKKLVDSTDKADLRLIYLALAHMIKFRGHFLIEGDLNPDNSDVDKLFIQLVQTYNQLFEENPINASGVDAKAILSARLSKSRRLENLIAQLPGEKKNGLFGNLIALSLGLTPNFKSNFDLAEDAKLQLSKDTYDDDLDNLLAQIGDQYADLFLAAKNLSDAILLSDILRVNTEITKAPLSASMIKRYDEHHQDLTLLKALVRQQLPEKYKEIFFDQSKNGYAGYIDGGASQEEFYKFIKPILEKMDGTEELLVKLNREDLLRKQRTFDNGSIPHQIHLGELHAILRRQEDFYPFLKDNREKIEKILTFRIPYYVGPLARGNSRFAWMTRKSEETITPWNFEEVVDKGASAQSFIERMTNFDKNLPNEKVLPKHSLLYEYFTVYNELTKVKYVTEGMRKPAFLSGEQKKAIVDLLFKTNRKVTVKQLKEDYFKKIECFDSVEISGVEDRFNASLGTYHDLLKIIKDKDFLDNEENEDILEDIVLTLTLFEDREMIEERLKTYAHLFDDKVMKQLKRRRYTGWGRLSRKLINGIRDKQSGKTILDFLKSDGFANRNFMQLIHDDSLTFKEDIQKAQVSGQGDSLHEHIANLAGSPAIKKGILQTVKVVDELVKVMGRHKPENIVIEMARENQTTQKGQKNSRERMKRIEEGIKELGSQILKEHPVENTQLQNEKLYLYYLQNGRDMYVDQELDINRLSDYDVDHIVPQSFLKDDSIDNKVLTRSDKARGKSDNVPSEEVVKKMKNYWRQLLNAKLITQRKFDNLTKAERGGLSELDKAGFIKRQLVETRQITKHVAQILDSRMNTKYDENDKLIREVKVITLKSKLVSDFRKDFQFYKVREINNYHHAHDAYLNAVVGTALIKKYPKLESEFVYGDYKVYDVRKMIAKSEQEIGKATAKYFFYSNIMNFFKTEITLANGEIRKRPLIETNGETGEIVWDKGRDFATVRKVLSMPQVNIVKKTEVQTGGFSKESILPKRNSDKLIARKKDWDPKKYGGFDSPTVAYSVLVVAKVEKGKSKKLKSVKELLGITIMERSSFEKNPIDFLEAKGYKEVKKDLIIKLPKYSLFELENGRKRMLASAGELQKGNELALPSKYVNFLYLASHYEKLKGSPEDNEQKQLFVEQHKHYLDEIIEQISEFSKRVILADANLDKVLSAYNKHRDKPIREQAENIIHLFTLTNLGAPAAFKYFDTTIDRKRYTSTKEVLDATLIHQSITGLYETRIDLSQLGGDGGPAPEAAAKGSSGGTLGIEDEYRLHETSTEPDVSLGSTWLSDFPQAWAETGGMGLAVRQAPLIIPLKATSTPVSIQQYPMSHEARLGIKPHIQRLLDQGILVPCQSPWNTPLLPVKKPGTNDYRPVQDLREVNKRVEDIHPTVPNPYNLLSGLPPSHQWYTVLDLKDAFFCLRLHPTSQPLFAFEWRDPGMGISGQLTWTRLPQGFKNSPTLFNEALHRDLADFRIQHPDLILLQYVDDILLAATSELDCQQGTRALLQTLGDLGYRASAKKAQICQKQVKYLGYLLREGQRWLTEARKETVMGQPVPKTPRQLREFLGTAGFCRLWIPGFAEMAAPLYPLTKPGTLFSWGPDQQKAYQEIKQALLTAPALGLPDLTKPFELFVDEKQGYAKGVLTQKLGPWRRPVAYLSKKLDPVAAGWPPCLRMVAAIAVLTKDAGKLTMGQPLVILAPHAVEALVKQPPDRWLSNARMTHYQAMLLDTDRVQFGPVVALNPATLLPLPEEGAPHDCLEILAETHGTRPDLTDQPIPDADHTWYTDGSSFLQEGQRKAGAAVTTETEVIWAGALPAGTSAQRAELIALTQALKMAEGKRLNVYTDSRYAFATAHIHGEIYRRRGWLTSEGREIKNKSEILALLKALFLPKRLSIIHCLGHQKGDSAEARGNRLADQAAREAAIKTPPDTSTLLAGKRTADGSEFEKRTADGSEFESPKKKAKVE

SEQ ID NO: 7644 - protein, 2096 aa, synthetic construct; identical to SEQ ID NO: 7643

SEQ ID NO: 7645 - protein, 2096 aa, synthetic construct
MPAAKRVKLDGGDKKYSIGLDIGTNSVGWAVITDEYKVPSKKFKVLGNTDRHSIKKNLIGALLFDSGETAEATRLKRTARRRYTRRKNRICYLQEIFSNEMAKVDDSFFHRLEESFLVEEDKKHERHPIFGNIVDEVAYHEKYPTIYHLRKKLVDSTDKADLRLIYLALAHMIKFRGHFLIEGDLNPDNSDVDKLFIQLVQTYNQLFEENPINASGVDAKAILSARLSKSRRLENLIAQLPGEKKNGLFGNLIALSLGLTPNFKSNFDLAEDAKLQLSKDTYDDDLDNLLAQIGDQYADLFLAAKNLSDAILLSDILRVNTEITKAPLSASMIKRYDEHHQDLTLLKALVRQQLPEKYKEIFFDQSKNGYAGYIDGGASQEEFYKFIKPILEKMDGTEELLVKLNREDLLRKQRTFDNGSIPHQIHLGELHAILRRQEDFYPFLKDNREKIEKILTFRIPYYVGPLARGNSRFAWMTRKSEETITPWNFEEVVDKGASAQSFIERMTNFDKNLPNEKVLPKHSLLYEYFTVYNELTKVKYVTEGMRKPAFLSGEQKKAIVDLLFKTNRKVTVKQLKEDYFKKIECFDSVEISGVEDRFNASLGTYHDLLKIIKDKDFLDNEENEDILEDIVLTLTLFEDREMIEERLKTYAHLFDDKVMKQLKRRRYTGWGRLSRKLINGIRDKQSGKTILDFLKSDGFANRNFMQLIHDDSLTFKEDIQKAQVSGQGDSLHEHIANLAGSPAIKKGILQTVKVVDELVKVMGRHKPENIVIEMARENQTTQKGQKNSRERMKRIEEGIKELGSQILKEHPVENTQLQNEKLYLYYLQNGRDMYVDQELDINRLSDYDVDHIVPQSFLKDDSIDNKVLTRSDKARGKSDNVPSEEVVKKMKNYWRQLLNAKLITQRKFDNLTKAERGGLSELDKAGFIKRQLVETRQITKHVAQILDSRMNTKYDENDKLIREVKVITLKSKLVSDFRKDFQFYKVREINNYHHAHDAYLNAVVGTALIKKYPKLESEFVYGDYKVYDVRKMIAKSEQEIGKATAKYFFYSNIMNFFKTEITLANGEIRKRPLIETNGETGEIVWDKGRDFATVRKVLSMPQVNIVKKTEVQTGGFSKESILPKRNSDKLIARKKDWDPKKYGGFDSPTVAYSVLVVAKVEKGKSKKLKSVKELLGITIMERSSFEKNPIDFLEAKGYKEVKKDLIIKLPKYSLFELENGRKRMLASAGELQKGNELALPSKYVNFLYLASHYEKLKGSPEDNEQKQLFVEQHKHYLDEIIEQISEFSKRVILADANLDKVLSAYNKHRDKPIREQAENIIHLFTLTNLGAPAAFKYFDTTIDRKRYTSTKEVLDATLIHQSITGLYETRIDLSQLGGDGGPAPEAAAKGSSGGTLNIEDEYRLHETSKGPDVPLGSTWLSDFPQAWAETGGMGLAVRQAPLIIPLKATSTPVSIKQYPMSQEARLGIKPHIQRLLDQGILVPCQSPWNTPLLPVKKPGTNDYRPVQDLREVNKRVEDIHPTVPNPYNLLSGLPPSHQWYTVLDLKDAFFCLRLHPTSQSLFAFEWRDPEMGISGQLTWTRLPQGFKNSPTLFDEALHRDLADFRIQHPDLILLQYVDDLLLAATSELDCQQGTRALLQTLGDLGYRASAKKAQICQKQVKYLGYLLKEGQRWLTEARKETVMGQPTPKTPRQLREFLGTAGFCRLWIPGFAEMAAPLYPLTKTGTLFEWGPDQQKAYQEIKQALLTAPALGLPDLTKPFELFVDEKQGYAKGVLTQKLGPWRRPVAYLSKKLDPVAAGWPPCLRMVAAIAVLTKDAGKLTMGQPLVILAPHAVEALVKQPPDRWLSNARMTHYQALLLDTDRVQFGPIVALNPATLLPLPEEGLQHDCLDILAEAHGTRPDLTDQPLPDADHTWYTDGSSFLQEGQRKAGAAVTTETEVVWAKALPAGTSAQRAELIALTQALKMAEGKKLNVYTDSRYAFATAHIHGEIYRRRGLLTSEGKEIKNKDEILALLKALFLPKRLSIIHCPGHQKGNRAEARGNRMADQAAREVATRETPETSTLLAGKRTADGSEFEKRTADGSEFESPKKKAKVE

SEQ ID NO: 7646 - protein, 2090 aa, synthetic construct
MPAAKRVKLDGGDKKYSIGLDIGTNSVGWAVITDEYKVPSKKFKVLGNTDRHSIKKNLIGALLFDSGETAEATRLKRTARRRYTRRKNRICYLQEIFSNEMAKVDDSFFHRLEESFLVEEDKKHERHPIFGNIVDEVAYHEKYPTIYHLRKKLVDSTDKADLRLIYLALAHMIKFRGHFLIEGDLNPDNSDVDKLFIQLVQTYNQLFEENPINASGVDAKAILSARLSKSRRLENLIAQLPGEKKNGLFGNLIALSLGLTPNFKSNFDLAEDAKLQLSKDTYDDDLDNLLAQIGDQYADLFLAAKNLSDAILLSDILRVNTEITKAPLSASMIKRYDEHHQDLTLLKALVRQQLPEKYKEIFFDQSKNGYAGYIDGGASQEEFYKFIKPILEKMDGTEELLVKLNREDLLRKQRTFDNGSIPHQIHLGELHAILRRQEDFYPFLKDNREKIEKILTFRIPYYVGPLARGNSRFAWMTRKSEETITPWNFEEVVDKGASAQSFIERMTNFDKNLPNEKVLPKHSLLYEYFTVYNELTKVKYVTEGMRKPAFLSGEQKKAIVDLLFKTNRKVTVKQLKEDYFKKIECFDSVEISGVEDRFNASLGTYHDLLKIIKDKDFLDNEENEDILEDIVLTLTLFEDREMIEERLKTYAHLFDDKVMKQLKRRRYTGWGRLSRKLINGIRDKQSGKTILDFLKSDGFANRNFMQLIHDDSLTFKEDIQKAQVSGQGDSLHEHIANLAGSPAIKKGILQTVKVVDELVKVMGRHKPENIVIEMARENQTTQKGQKNSRERMKRIEEGIKELGSQILKEHPVENTQLQNEKLYLYYLQNGRDMYVDQELDINRLSDYDVDHIVPQSFLKDDSIDNKVLTRSDKARGKSDNVPSEEVVKKMKNYWRQLLNAKLITQRKFDNLTKAERGGLSELDKAGFIKRQLVETRQITKHVAQILDSRMNTKYDENDKLIREVKVITLKSKLVSDFRKDFQFYKVREINNYHHAHDAYLNAVVGTALIKKYPKLESEFVYGDYKVYDVRKMIAKSEQEIGKATAKYFFYSNIMNFFKTEITLANGEIRKRPLIETNGETGEIVWDKGRDFATVRKVLSMPQVNIVKKTEVQTGGFSKESILPKRNSDKLIARKKDWDPKKYGGFDSPTVAYSVLVVAKVEKGKSKKLKSVKELLGITIMERSSFEKNPIDFLEAKGYKEVKKDLIIKLPKYSLFELENGRKRMLASAGELQKGNELALPSKYVNFLYLASHYEKLKGSPEDNEQKQLFVEQHKHYLDEIIEQISEFSKRVILADANLDKVLSAYNKHRDKPIREQAENIIHLFTLTNLGAPAAFKYFDTTIDRKRYTSTKEVLDATLIHQSITGLYETRIDLSQLGGDGGPAPEAAAKGSSGGTLQLDDEYRLYSPLVKPDQNIQFWLEQFPQAWAETAGMGLAKQVPPQVIQLKASATPVSVRQYPLSKEAQEGIRPHVQRLIQQGILVPVQSPWNTPLLPVRKPGTNDYRPVQDLREVNKRVQDIHPTVPNPYNLLCALPPQRSWYTVLDLKDAFFCLRLHPTSQPLFAFEWRDPGTGRTGQLTWTRLPQGFKNSPTIFDEALHRDLANFRIQHPQVTLLQYVDDLLLAGATKQDCLEGTKALLLELSDLGYRASAKKAQICRREVTYLGYSLRDGQRWLTEARKKTVVQIPAPTTAKQVREFLGTAGFCRLWIPGFATLAAPLYPLTKEKGEFSWAPEHQKAFDAIKKALLSAPALALPDVTKPFTLYVDERKGVARGVLTQTLGPWRRPVAYLSKKLDPVASGWPVCLKAIAAVAILVKDADKLTLGQNITVIAPHALENIVRQPPDRWMTNARMTHYQSLLLTERVTFAPPAALNPATLLPEETDEPVTHDCHQLLIEETGVRKDLTDIPLTGEVLTWFTDGSSYVVEGKRMAGAAVVDGTRTIWASSLPEGTSAQKAELMALTQALRLAEGKSINIYTDSRYAFATAHVHGAIYKQRGLLTSAGREIKNKEEILSLLEALHLPKRLAIIHCPGHQKAKDPISRGNQMADRVAKQAAQGVNLLAGKRTADGSEFEKRTADGSEFESPKKKAKVE

SEQ ID NO: 7647 - protein, 2087 aa, synthetic construct
MPAAKRVKLDGGDKKYSIGLDIGTNSVGWAVITDEYKVPSKKFKVLGNTDRHSIKKNLIGALLFDSGETAEATRLKRTARRRYTRRKNRICYLQEIFSNEMAKVDDSFFHRLEESFLVEEDKKHERHPIFGNIVDEVAYHEKYPTIYHLRKKLVDSTDKADLRLIYLALAHMIKFRGHFLIEGDLNPDNSDVDKLFIQLVQTYNQLFEENPINASGVDAKAILSARLSKSRRLENLIAQLPGEKKNGLFGNLIALSLGLTPNFKSNFDLAEDAKLQLSKDTYDDDLDNLLAQIGDQYADLFLAAKNLSDAILLSDILRVNTEITKAPLSASMIKRYDEHHQDLTLLKALVRQQLPEKYKEIFFDQSKNGYAGYIDGGASQEEFYKFIKPILEKMDGTEELLVKLNREDLLRKQRTFDNGSIPHQIHLGELHAILRRQEDFYPFLKDNREKIEKILTFRIPYYVGPLARGNSRFAWMTRKSEETITPWNFEEVVDKGASAQSFIERMTNFDKNLPNEKVLPKHSLLYEYFTVYNELTKVKYVTEGMRKPAFLSGEQKKAIVDLLFKTNRKVTVKQLKEDYFKKIECFDSVEISGVEDRFNASLGTYHDLLKIIKDKDFLDNEENEDILEDIVLTLTLFEDREMIEERLKTYAHLFDDKVMKQLKRRRYTGWGRLSRKLINGIRDKQSGKTILDFLKSDGFANRNFMQLIHDDSLTFKEDIQKAQVSGQGDSLHEHIANLAGSPAIKKGILQTVKVVDELVKVMGRHKPENIVIEMARENQTTQKGQKNSRERMKRIEEGIKELGSQILKEHPVENTQLQNEKLYLYYLQNGRDMYVDQELDINRLSDYDVDHIVPQSFLKDDSIDNKVLTRSDKARGKSDNVPSEEVVKKMKNYWRQLLNAKLITQRKFDNLTKAERGGLSELDKAGFIKRQLVETRQITKHVAQILDSRMNTKYDENDKLIREVKVITLKSKLVSDFRKDFQFYKVREINNYHHAHDAYLNAVVGTALIKKYPKLESEFVYGDYKVYDVRKMIAKSEQEIGKATAKYFFYSNIMNFFKTEITLANGEIRKRPLIETNGETGEIVWDKGRDFATVRKVLSMPQVNIVKKTEVQTGGFSKESILPKRNSDKLIARKKDWDPKKYGGFDSPTVAYSVLVVAKVEKGKSKKLKSVKELLGITIMERSSFEKNPIDFLEAKGYKEVKKDLIIKLPKYSLFELENGRKRMLASAGELQKGNELALPSKYVNFLYLASHYEKLKGSPEDNEQKQLFVEQHKHYLDEIIEQISEFSKRVILADANLDKVLSAYNKHRDKPIREQAENIIHLFTLTNLGAPAAFKYFDTTIDRKRYTSTKEVLDATLIHQSITGLYETRIDLSQLGGDGGPAPEAAAKGSSGGIPWLMKKPLQLTTLVPLQEYEERLLKQTMLTGSYKEKLQSLFLKYDALWQHWENQVGHRRIKPHHIATGTVNPRPQKQYPINPKAKASIQTVINDLLKQGVLIQQNSIMNTPVYPVPKPDGKWRMVLDYREVNKTIPLIAAQNQHSAGILSSIFRGKYKTTLDLSNGFWAHSITPESYWLTAFTWLGQQYCWTRLPQGFLNSPALFNADVVDLLKEVPNVQVYVDDIYISHDDPREHLEQLEKVFSLLLNAGYVVSLKKSEIAQHEVEFLGFNITKEGRGLTETFKQKLLNITPPRDLKQLQSILGLLNFARNFIPNFSELVKPLYNIIATAPGKYITWTTDNSQQLQNIISMLNSAENLEERNPEVRLIMKVNTSPSAGYIRFYNEFAKRPIMYLNYVYTKAEVKFTNTEKLLTTIHKGLIKALDLGMGQEILVYSPIVSMTKIQKTPLPERKALPIRWITWMSYLEDPRIQFHYDKTLPELQQVPTVTDDIIAKIKHPSEFSMVFYTDGSAIKHPNVNKSHNAGMGIAQVQFKPEFTVINTWSIPLGDHTAQLAEVAAVEFACKKALKIDGPVLIVTDSFYVAESVNKELPYWQSNGFFNNKKKPLKHVSKWKSIADCIQLKPDIIIIHEKGHQPTASTFHTEGNNLADKLATQGSYVVNAGKRTADGSEFEKRTADGSEFESPKKKAKVE

SEQ ID NO: 7648 - protein, 2176 aa, synthetic construct
MPAAKRVKLDGGDKKYSIGLDIGTNSVGWAVITDEYKVPSKKFKVLGNTDRHSIKKNLIGALLFDSGETAEATRLKRTARRRYTRRKNRICYLQEIFSNEMAKVDDSFFHRLEESFLVEEDKKHERHPIFGNIVDEVAYHEKYPTIYHLRKKLVDSTDKADLRLIYLALAHMIKFRGHFLIEGDLNPDNSDVDKLFIQLVQTYNQLFEENPINASGVDAKAILSARLSKSRRLENLIAQLPGEKKNGLFGNLIALSLGLTPNFKSNFDLAEDAKLQLSKDTYDDDLDNLLAQIGDQYADLFLAAKNLSDAILLSDILRVNTEITKAPLSASMIKRYDEHHQDLTLLKALVRQQLPEKYKEIFFDQSKNGYAGYIDGGASQEEFYKFIKPILEKMDGTEELLVKLNREDLLRKQRTFDNGSIPHQIHLGELHAILRRQEDFYPFLKDNREKIEKILTFRIPYYVGPLARGNSRFAWMTRKSEETITPWNFEEVVDKGASAQSFIERMTNFDKNLPNEKVLPKHSLLYEYFTVYNELTKVKYVTEGMRKPAFLSGEQKKAIVDLLFKTNRKVTVKQLKEDYFKKIECFDSVEISGVEDRFNASLGTYHDLLKIIKDKDFLDNEENEDILEDIVLTLTLFEDREMIEERLKTYAHLFDDKVMKQLKRRRYTGWGRLSRKLINGIRDKQSGKTILDFLKSDGFANRNFMQLIHDDSLTFKEDIQKAQVSGQGDSLHEHIANLAGSPAIKKGILQTVKVVDELVKVMGRHKPENIVIEMARENQTTQKGQKNSRERMKRIEEGIKELGSQILKEHPVENTQLQNEKLYLYYLQNGRDMYVDQELDINRLSDYDVDHIVPQSFLKDDSIDNKVLTRSDKARGKSDNVPSEEVVKKMKNYWRQLLNAKLITQRKFDNLTKAERGGLSELDKAGFIKRQLVETRQITKHVAQILDSRMNTKYDENDKLIREVKVITLKSKLVSDFRKDFQFYKVREINNYHHAHDAYLNAVVGTALIKKYPKLESEFVYGDYKVYDVRKMIAKSEQEIGKATAKYFFYSNIMNFFKTEITLANGEIRKRPLIETNGETGEIVWDKGRDFATVRKVLSMPQVNIVKKTEVQTGGFSKESILPKRNSDKLIARKKDWDPKKYGGFDSPTVAYSVLVVAKVEKGKSKKLKSVKELLGITIMERSSFEKNPIDFLEAKGYKEVKKDLIIKLPKYSLFELENGRKRMLASAGELQKGNELALPSKYVNFLYLASHYEKLKGSPEDNEQKQLFVEQHKHYLDEIIEQISEFSKRVILADANLDKVLSAYNKHRDKPIREQAENIIHLFTLTNLGAPAAFKYFDTTIDRKRYTSTKEVLDATLIHQSITGLYETRIDLSQLGGDGGPAPEAAAKGSSGGMNPLQLLQPLPAEVKGTKLLAHWNSGATITCIPESFLEDEQPIKQTLIKTIHGEKQQNVYYLTFKVKGRKVEAEVIASPYEYILLSPTDVPWLTQQPLQLTILVPLQEYQDRILNKTALPEEQKQQLKALFTKYDNLWQHWENQVGHRKIRPHNIATGDYPPRPQKQYPINPKAKPSIQIVIDDLLKQGVLTPQNSTMNTPVYPVPKPDGRWRMVLDYREVNKTIPLTAAQNQHSAGILATIVRQKYKTTLDLANGFWAHPITPDSYWLTAFTWQGKQYCWTRLPQGFLNSPALFNADAVDLLKEVPNVQVYVDDIYLSHDNPHEHIQQLEKVFQILLQAGYVVSLKKSEIGQRTVEFLGFNITKEGRGLTDTFKTKLLNVTPPKDLKQLQSILGKLNFARNFIPNFAELVQTLYNLIASSPGKYIEWTEDNTKQLNKVIEALNTASNLEERLPDQRLVIKVNTSPSAGYVRYYNESGKKPIMYLNYVFSKAELKFSMLEKLLTTMHKALIKAMDLAMGQEILVYSPIVSMTKIQKTPLPERKALPIRWITWMTYLEDPRIQFHYDKTLPELKHIPDVYTSSIPPLKHPSQYEGVFCTDGSAIKSPDPTKSNNAGMGIVHAIYNPEYKILNQWSIPLGHHTAQMAEIAAVEFACKKALKVPGPVLVITDSFYVAESANKELPYWKSNGFVNNKKEPLKHISKWKSIAECLSIKPDITIQHEKGHQPINTSIHTEGNALADKLATQGSYVVNAGKRTADGSEFEKRTADGSEFESPKKKAKVE

SEQ ID NO: 7649 - protein, 2096 aa, synthetic construct
MPAAKRVKLDGGDKKYSIGLDIGTNSVGWAVITDEYKVPSKKFKVLGNTDRHSIKKNLIGALLFDSGETAEATRLKRTARRRYTRRKNRICYLQEIFSNEMAKVDDSFFHRLEESFLVEEDKKHERHPIFGNIVDEVAYHEKYPTIYHLRKKLVDSTDKADLRLIYLALAHMIKFRGHFLIEGDLNPDNSDVDKLFIQLVQTYNQLFEENPINASGVDAKAILSARLSKSRRLENLIAQLPGEKKNGLFGNLIALSLGLTPNFKSNFDLAEDAKLQLSKDTYDDDLDNLLAQIGDQYADLFLAAKNLSDAILLSDILRVNTEITKAPLSASMIKRYDEHHQDLTLLKALVRQQLPEKYKEIFFDQSKNGYAGYIDGGASQEEFYKFIKPILEKMDGTEELLVKLNREDLLRKQRTFDNGSIPHQIHLGELHAILRRQEDFYPFLKDNREKIEKILTFRIPYYVGPLARGNSRFAWMTRKSEETITPWNFEEVVDKGASAQSFIERMTNFDKNLPNEKVLPKHSLLYEYFTVYNELTKVKYVTEGMRKPAFLSGEQKKAIVDLLFKTNRKVTVKQLKEDYFKKIECFDSVEISGVEDRFNASLGTYHDLLKIIKDKDFLDNEENEDILEDIVLTLTLFEDREMIEERLKTYAHLFDDKVMKQLKRRRYTGWGRLSRKLINGIRDKQSGKTILDFLKSDGFANRNFMQLIHDDSLTFKEDIQKAQVSGQGDSLHEHIANLAGSPAIKKGILQTVKVVDELVKVMGRHKPENIVIEMARENQTTQKGQKNSRERMKRIEEGIKELGSQILKEHPVENTQLQNEKLYLYYLQNGRDMYVDQELDINRLSDYDVDHIVPQSFLKDDSIDNKVLTRSDKARGKSDNVPSEEVVKKMKNYWRQLLNAKLITQRKFDNLTKAERGGLSELDKAGFIKRQLVETRQITKHVAQILDSRMNTKYDENDKLIREVKVITLKSKLVSDFRKDFQFYKVREINNYHHAHDAYLNAVVGTALIKKYPKLESEFVYGDYKVYDVRKMIAKSEQEIGKATAKYFFYSNIMNFFKTEITLANGEIRKRPLIETNGETGEIVWDKGRDFATVRKVLSMPQVNIVKKTEVQTGGFSKESILPKRNSDKLIARKKDWDPKKYGGFDSPTVAYSVLVVAKVEKGKSKKLKSVKELLGITIMERSSFEKNPIDFLEAKGYKEVKKDLIIKLPKYSLFELENGRKRMLASAGELQKGNELALPSKYVNFLYLASHYEKLKGSPEDNEQKQLFVEQHKHYLDEIIEQISEFSKRVILADANLDKVLSAYNKHRDKPIREQAENIIHLFTLTNLGAPAAFKYFDTTIDRKRYTSTKEVLDATLIHQSITGLYETRIDLSQLGGDGGPAPEAAAKGSSGGTLNIEDEYRLHETSKEPDVPLGSTWLSDFPQAWAETGGMGLAVRQAPLIIPLKATSTPVSIKQYPMSQEARLGIKPHIQRLLDQGILVPCQSPWNTPLLPVKKPGTNDYRPVQDLREVNKRVEDIHPTVPNPYNLLSGLPPSHQWYTVLDLKDAFFCLRLHPTSQPLFAFEWRDPEMGISGQLTWTRLPQGFKNSPTLFNEALHRDLADFRIQHPDLILLQYVDDLLLAATSEQDCQRGTRALLQTLGNLGYRASAKKAQICQKQVKYLGYLLKEGQRWLTEARKETVMGQPTPKTPRQLREFLGTAGFCRLWIPGFAEMAAPLYPLTKPGTLFNWGPDQQKAYQEIKQALLTAPALGLPDLTKPFELFVDEKQGYAKGVLTQKLGPWRRPVAYLSKKLDPVAAGWPPCLRMVAAIAVLTKDAGKLTMGQPLVILAPHAVEALVKQPPDRWLSNARMTHYQAMLLDTDRVQFGPVVALNPATLLPLPEKEAPHDCLEILAETHGTRPDLTDQPIPDADYTWYTDGSSFLQEGQRRAGAAVTTETEVIWARALPAGTSAQRAELIALTQALKMAEGKKLNVYTDSRYAFATAHVHGEIYRRRGWLTSEGREIKNKNEILALLKALFLPKRLSIIHCPGHQKGNSAEARGNRMADQAAREAAMKAVLETSTLLAGKRTADGSEFEKRTADGSEFESPKKKAKVE

SEQ ID NO: 7650 - protein, 2122 aa, synthetic construct
MPAAKRVKLDGGDKKYSIGLDIGTNSVGWAVITDEYKVPSKKFKVLGNTDRHSIKKNLIGALLFDSGETAEATRLKRTARRRYTRRKNRICYLQEIFSNEMAKVDDSFFHRLEESFLVEEDKKHERHPIFGNIVDEVAYHEKYPTIYHLRKKLVDSTDKADLRLIYLALAHMIKFRGHFLIEGDLNPDNSDVDKLFIQLVQTYNQLFEENPINASGVDAKAILSARLSKSRRLENLIAQLPGEKKNGLFGNLIALSLGLTPNFKSNFDLAEDAKLQLSKDTYDDDLDNLLAQIGDQYADLFLAAKNLSDAILLSDILRVNTEITKAPLSASMIKRYDEHHQDLTLLKALVRQQLPEKYKEIFFDQSKNGYAGYIDGGASQEEFYKFIKPILEKMDGTEELLVKLNREDLLRKQRTFDNGSIPHQIHLGELHAILRRQEDFYPFLKDNREKIEKILTFRIPYYVGPLARGNSRFAWMTRKSEETITPWNFEEVVDKGASAQSFIERMTNFDKNLPNEKVLPKHSLLYEYFTVYNELTKVKYVTEGMRKPAFLSGEQKKAIVDLLFKTNRKVTVKQLKEDYFKKIECFDSVEISGVEDRFNASLGTYHDLLKIIKDKDFLDNEENEDILEDIVLTLTLFEDREMIEERLKTYAHLFDDKVMKQLKRRRYTGWGRLSRKLINGIRDKQSGKTILDFLKSDGFANRNFMQLIHDDSLTFKEDIQKAQVSGQGDSLHEHIANLAGSPAIKKGILQTVKVVDELVKVMGRHKPENIVIEMARENQTTQKGQKNSRERMKRIEEGIKELGSQILKEHPVENTQLQNEKLYLYYLQNGRDMYVDQELDINRLSDYDVDHIVPQSFLKDDSIDNKVLTRSDKARGKSDNVPSEEVVKKMKNYWRQLLNAKLITQRKFDNLTKAERGGLSELDKAGFIKRQLVETRQITKHVAQILDSRMNTKYDENDKLIREVKVITLKSKLVSDFRKDFQFYKVREINNYHHAHDAYLNAVVGTALIKKYPKLESEFVYGDYKVYDVRKMIAKSEQEIGKATAKYFFYSNIMNFFKTEITLANGEIRKRPLIETNGETGEIVWDKGRDFATVRKVLSMPQVNIVKKTEVQTGGFSKESILPKRNSDKLIARKKDWDPKKYGGFDSPTVAYSVLVVAKVEKGKSKKLKSVKELLGITIMERSSFEKNPIDFLEAKGYKEVKKDLIIKLPKYSLFELENGRKRMLASAGELQKGNELALPSKYVNFLYLASHYEKLKGSPEDNEQKQLFVEQHKHYLDEIIEQISEFSKRVILADANLDKVLSAYNKHRDKPIREQAENIIHLFTLTNLGAPAAFKYFDTTIDRKRYTSTKEVLDATLIHQSITGLYETRIDLSQLGGDGGAEAAAKEAAAKEAAAKEAAAKALEAEAAAKEAAAKEAAAKEAAAKAGGVPWILKKPLELTIKLDLEEQQGTLLNNSILSKKGKEELKQLFEKYSALWQSWENQVGHRRIRPHKIATGTVKPTPQKQYHINPKAKPDIQIVINDLLKQGVLIQKESTMNTPVYPVPKPNGRWRMVLDYRAVNKVTPLIAVQNQHSYGILGSLFKGRYKTTIDLSNGFWAHPIVPEDYWITAFTWQGKQYCWTVLPQGFLNSPGLFTGDVVDLLQGIPNVEVYVDDVYISHDSEKEHLEYLDILFNRLKEAGYIISLKKSNIANSIVDFLGFQITNEGRGLTDTFKEKLENITAPTTLKQLQSILGLLNFARNFIPDFTELIAPLYALIPKSTKNYVPWQIEHSTTLETLITKLNGAEYLQGRKGDKTLIMKVNASYTTGYIRYYNEGEKKPISYVSIVFSKTELKFTELEKLLTTVHKGLLKALDLSMGQNIHVYSPIVSMQNIQKTPQTAKKALASRWLSWLSYLEDPRIRFFYDPQMPALKDLPAVDTGKDNKKHPSNFQHIFYTDGSAITSPTKEGHLNAGMGIVYFINKDGNLQKQQEWSISLGNHTAQFAEIAAFEFALKKCLPLGGNILVVTDSNYVAKAYNEELDVWASNGFVNNRKKPLKHISKWKSVADLKRLRPDVVVTHEPGHQKLDSSPHAYGNNLADQLATQASFKVHAGKRTADGSEFEKRTADGSEFESPKKKAKVE

SEQ ID NO: 7651 - protein, 2122 aa, synthetic construct
MPAAKRVKLDGGDKKYSIGLDIGTNSVGWAVITDEYKVPSKKFKVLGNTDRHSIKKNLIGALLFDSGETAEATRLKRTARRRYTRRKNRICYLQEIFSNEMAKVDDSFFHRLEESFLVEEDKKHERHPIFGNIVDEVAYHEKYPTIYHLRKKLVDSTDKADLRLIYLALAHMIKFRGHFLIEGDLNPDNSDVDKLFIQLVQTYNQLFEENPINASGVDAKAILSARLSKSRRLENLIAQLPGEKKNGLFGNLIALSLGLTPNFKSNFDLAEDAKLQLSKDTYDDDLDNLLAQIGDQYADLFLAAKNLSDAILLSDILRVNTEITKAPLSASMIKRYDEHHQDLTLLKALVRQQLPEKYKEIFFDQSKNGYAGYIDGGASQEEFYKFIKPILEKMDGTEELLVKLNREDLLRKQRTFDNGSIPHQIHLGELHAILRRQEDFYPFLKDNREKIEKILTFRIPYYVGPLARGNSRFAWMTRKSEETITPWNFEEVVDKGASAQSFIERMTNFDKNLPNEKVLPKHSLLYEYFTVYNELTKVKYVTEGMRKPAFLSGEQKKAIVDLLFKTNRKVTVKQLKEDYFKKIECFDSVEISGVEDRFNASLGTYHDLLKIIKDKDFLDNEENEDILEDIVLTLTLFEDREMIEERLKTYAHLFDDKVMKQLKRRRYTGWGRLSRKLINGIRDKQSGKTILDFLKSDGFANRNFMQLIHDDSLTFKEDIQKAQVSGQGDSLHEHIANLAGSPAIKKGILQTVKVVDELVKVMGRHKPENIVIEMARENQTTQKGQKNSRERMKRIEEGIKELGSQILKEHPVENTQLQNEKLYLYYLQNGRDMYVDQELDINRLSDYDVDHIVPQSFLKDDSIDNKVLTRSDKARGKSDNVPSEEVVKKMKNYWRQLLNAKLITQRKFDNLTKAERGGLSELDKAGFIKRQLVETRQITKHVAQILDSRMNTKYDENDKLIREVKVITLKSKLVSDFRKDFQFYKVREINNYHHAHDAYLNAVVGTALIKKYPKLESEFVYGDYKVYDVRKMIAKSEQEIGKATAKYFFYSNIMNFFKTEITLANGEIRKRPLIETNGETGEIVWDKGRDFATVRKVLSMPQVNIVKKTEVQTGGFSKESILPKRNSDKLIARKKDWDPKKYGGFDSPTVAYSVLVVAKVEKGKSKKLKSVKELLGITIMERSSFEKNPIDFLEAKGYKEVKKDLIIKLPKYSLFELENGRKRMLASAGELQKGNELALPSKYVNFLYLASHYEKLKGSPEDNEQKQLFVEQHKHYLDEIIEQISEFSKRVILADANLDKVLSAYNKHRDKPIREQAENIIHLFTLTNLGAPAAFKYFDTTIDRKRYTSTKEVLDATLIHQSITGLYETRIDLSQLGGDGGAEAAAKEAAAKEAAAKEAAAKALEAEAAAKEAAAKEAAAKEAAAKAGGVPWILKKPLELTIKLDLEEQQGTLLNNSILSKKGKEELKQLFEKYSALWQSWENQVGHRRIRPHKIATGTVKPTPQKQYHINPKAKPDIQIVINDLLKQGVLIQKESTMNTPVYPVPKPNGRWRMVLDYRAVNKVTPLIAVQNQHSYGILGSLFKGRYKTTIDLSNGFWAHPIVPEDYWITAFTWQGKQYCWTVLPQGFLNSPGLFNGDVVDLLQGIPNVEVYVDDVYISHDSEKEHLEYLDILFNRLKEAGYIISLKKSNIANSIVDFLGFQITNEGRGLTDTFKEKLENITAPTTLKQLQSILGKLNFARNFIPDFTELIAPLYALIPKSPKNYVPWQIEHSTTLETLITKLNGAEYLQGRKGDKTLIMKVNASYTTGYIRYYNEGEKKPISYVSIVFSKTELKFTELEKLLTTVHKGLLKALDLSMGQNIHVYSPIVSMQNIQKTPQTAKKALASRWLSWLSYLEDPRIRFFYDPQMPALKDLPAVDTGKDNKKHPSNFQHIFYTDGSAITSPTKEGHLNAGMGIVYFINKDGNLQKQQEWSISLGNHTAQFAEIAAFEFALKKCLPLGGNILVVTDSNYVAKAYNEELDVWASNGFVNNRKKPLKHISKWKSVADLKRLRPDVVVTHEPGHQKLDSSPHAYGNNLADQLATQASFKVHAGKRTADGSEFEKRTADGSEFESPKKKAKVE

SEQ ID NO: 7652 - protein, 2122 aa, synthetic construct
MPAAKRVKLDGGDKKYSIGLDIGTNSVGWAVITDEYKVPSKKFKVLGNTDRHSIKKNLIGALLFDSGETAEATRLKRTARRRYTRRKNRICYLQEIFSNEMAKVDDSFFHRLEESFLVEEDKKHERHPIFGNIVDEVAYHEKYPTIYHLRKKLVDSTDKADLRLIYLALAHMIKFRGHFLIEGDLNPDNSDVDKLFIQLVQTYNQLFEENPINASGVDAKAILSARLSKSRRLENLIAQLPGEKKNGLFGNLIALSLGLTPNFKSNFDLAEDAKLQLSKDTYDDDLDNLLAQIGDQYADLFLAAKNLSDAILLSDILRVNTEITKAPLSASMIKRYDEHHQDLTLLKALVRQQLPEKYKEIFFDQSKNGYAGYIDGGASQEEFYKFIKPILEKMDGTEELLVKLNREDLLRKQRTFDNGSIPHQIHLGELHAILRRQEDFYPFLKDNREKIEKILTFRIPYYVGPLARGNSRFAWMTRKSEETITPWNFEEVVDKGASAQSFIERMTNFDKNLPNEKVLPKHSLLYEYFTVYNELTKVKYVTEGMRKPAFLSGEQKKAIVDLLFKTNRKVTVKQLKEDYFKKIECFDSVEISGVEDRFNASLGTYHDLLKIIKDKDFLDNEENEDILEDIVLTLTLFEDREMIEERLKTYAHLFDDKVMKQLKRRRYTGWGRLSRKLINGIRDKQSGKTILDFLKSDGFANRNFMQLIHDDSLTFKEDIQKAQVSGQGDSLHEHIANLAGSPAIKKGILQTVKVVDELVKVMGRHKPENIVIEMARENQTTQKGQKNSRERMKRIEEGIKELGSQILKEHPVENTQLQNEKLYLYYLQNGRDMYVDQELDINRLSDYDVDHIVPQSFLKDDSIDNKVLTRSDKARGKSDNVPSEEVVKKMKNYWRQLLNAKLITQRKFDNLTKAERGGLSELDKAGFIKRQLVETRQITKHVAQILDSRMNTKYDENDKLIREVKVITLKSKLVSDFRKDFQFYKVREINNYHHAHDAYLNAVVGTALIKKYPKLESEFVYGDYKVYDVRKMIAKSEQEIGKATAKYFFYSNIMNFFKTEITLANGEIRKRPLIETNGETGEIVWDKGRDFATVRKVLSMPQVNIVKKTEVQTGGFSKESILPKRNSDKLIARKKDWDPKKYGGFDSPTVAYSVLVVAKVEKGKSKKLKSVKELLGITIMERSSFEKNPIDFLEAKGYKEVKKDLIIKLPKYSLFELENGRKRMLASAGELQKGNELALPSKYVNFLYLASHYEKLKGSPEDNEQKQLFVEQHKHYLDEIIEQISEFSKRVILADANLDKVLSAYNKHRDKPIREQAENIIHLFTLTNLGAPAAFKYFDTTIDRKRYTSTKEVLDATLIHQSITGLYETRIDLSQLGGDGGAEAAAKEAAAKEAAAKEAAAKALEAEAAAKEAAAKEAAAKEAAAKAGGVPWLTQQPLQLTILVPLQEYQEKILSKTALPEDQKQQLKTLFVKYDNLWQHWENQVGHRKIRPHNIATGDYPPRPQKQYPINPKAKPSIQIVIDDLLKQGVLTPQNSTMNTPVYPVPKPDGRWRMVLDYREVNKTIPLTAAQNQHSAGILATIVRQKYKTTLDLANGFWAHPITPESYWLTAFTWQGKQYCWTRLPQGFLNSPALFTADVVDLLKEIPNVQVYVDDIYLSHDDPKEHVQQLEKVFQILLQAGYVVSLKKSEIGQKTVEFLGFNITKEGRGLTDTFKTKLLNITPPKDLKQLQSILGLLNFARNFIPNFAELVQPLYNLIASAKGKYIEWSEENTKQLNMVIEALNTASNLEERLPEQRLVIKVNTSPSAGYVRYYNETGKKPIMYLNYVFSKAELKFSMLEKLLTTMHKALIKAMDLAMGQEILVYSPIVSMTKIQKTPLPERKALPIRWITWMTYLEDPRIQFHYDKTLPELKHIPDVYTSSQSPVKHPSQYEGVFYTDGSAIKSPDPTKSNNAGMGIVHATYKPEYQVLNQWSIPLGNHTAQMAEIAAVEFACKKALKIPGPVLVITDSFYVAESANKELPYWKSNGFVNNKKKPLKHISKWKSIAECLSMKPDITIQHEKGISLQIPVFILKGNALADKLATQGSYVVNAGKRTADGSEFEKRTADGSEFESPKKKAKVE

SEQ ID NO: 7653 - protein, 2211 aa, synthetic construct
MPAAKRVKLDGGDKKYSIGLDIGTNSVGWAVITDEYKVPSKKFKVLGNTDRHSIKKNLIGALLFDSGETAEATRLKRTARRRYTRRKNRICYLQEIFSNEMAKVDDSFFHRLEESFLVEEDKKHERHPIFGNIVDEVAYHEKYPTIYHLRKKLVDSTDKADLRLIYLALAHMIKFRGHFLIEGDLNPDNSDVDKLFIQLVQTYNQLFEENPINASGVDAKAILSARLSKSRRLENLIAQLPGEKKNGLFGNLIALSLGLTPNFKSNFDLAEDAKLQLSKDTYDDDLDNLLAQIGDQYADLFLAAKNLSDAILLSDILRVNTEITKAPLSASMIKRYDEHHQDLTLLKALVRQQLPEKYKEIFFDQSKNGYAGYIDGGASQEEFYKFIKPILEKMDGTEELLVKLNREDLLRKQRTFDNGSIPHQIHLGELHAILRRQEDFYPFLKDNREKIEKILTFRIPYYVGPLARGNSRFAWMTRKSEETITPWNFEEVVDKGASAQSFIERMTNFDKNLPNEKVLPKHSLLYEYFTVYNELTKVKYVTEGMRKPAFLSGEQKKAIVDLLFKTNRKVTVKQLKEDYFKKIECFDSVEISGVEDRFNASLGTYHDLLKIIKDKDFLDNEENEDILEDIVLTLTLFEDREMIEERLKTYAHLFDDKVMKQLKRRRYTGWGRLSRKLINGIRDKQSGKTILDFLKSDGFANRNFMQLIHDDSLTFKEDIQKAQVSGQGDSLHEHIANLAGSPAIKKGILQTVKVVDELVKVMGRHKPENIVIEMARENQTTQKGQKNSRERMKRIEEGIKELGSQILKEHPVENTQLQNEKLYLYYLQNGRDMYVDQELDINRLSDYDVDHIVPQSFLKDDSIDNKVLTRSDKARGKSDNVPSEEVVKKMKNYWRQLLNAKLITQRKFDNLTKAERGGLSELDKAGFIKRQLVETRQITKHVAQILDSRMNTKYDENDKLIREVKVITLKSKLVSDFRKDFQFYKVREINNYHHAHDAYLNAVVGTALIKKYPKLESEFVYGDYKVYDVRKMIAKSEQEIGKATAKYFFYSNIMNFFKTEITLANGEIRKRPLIETNGETGEIVWDKGRDFATVRKVLSMPQVNIVKKTEVQTGGFSKESILPKRNSDKLIARKKDWDPKKYGGFDSPTVAYSVLVVAKVEKGKSKKLKSVKELLGITIMERSSFEKNPIDFLEAKGYKEVKKDLIIKLPKYSLFELENGRKRMLASAGELQKGNELALPSKYVNFLYLASHYEKLKGSPEDNEQKQLFVEQHKHYLDEIIEQISEFSKRVILADANLDKVLSAYNKHRDKPIREQAENIIHLFTLTNLGAPAAFKYFDTTIDRKRYTSTKEVLDATLIHQSITGLYETRIDLSQLGGDGGAEAAAKEAAAKEAAAKEAAAKALEAEAAAKEAAAKEAAAKEAAAKAGGMNPLQLLQPLPAEIKGTKLLAHWNSGATITCIPESFLEDEQPIKKTLIKTIHGEKQQNVYYVTFKVKGRKVEAEVIASPYEYILLSPTDVPWLTQQPLQLTILVPLQEYQEKILSKTALPEDQKQQLKTLFVKYDNLWQHWENQVGHRKIRPHNIATGDYPPRPQKQYPINPKAKPSIQIVIDDLLKQGVLTPQNSTMNTPVYPVPKPDGRWRMVLDYREVNKTIPLTAAQNQHSAGILATIVRQKYKTTLDLANGFWAHPITPESYWLTAFTWQGKQYCWTRLPQGFLNSPALFNADVVDLLKEIPNVQVYVDDIYLSHDDPKEHVQQLEKVFQILLQAGYVVSLKKSEIGQKTVEFLGFNITKEGRGLTDTFKTKLLNITPPKDLKQLQSILGLLNFARNFIPNFAELVQPLYNLIAPAKGKYIEWSEENTKQLNMVIEALNTASNLEERLPEQRLVIKVNTSPSAGYVRYYNETGKKPIMYLNYVFSKAELKFSMLEKLLTTMHKALIKAMDLAMGQEILVYSPIVSMTKIQKTPLPERKALPIRWITWMTYLEDPRIQFHYDKTLPELKHIPDVYTSSQSPVKHPSQYEGVFYTDGSAIKSPDPTKSNNAGMGIVHATYKPEYQVLNQWSIPLGNHTAQMAEIAAVEFACKKALKIPGPVLVITDSFYVAESANKELPYWKSNGFVNNKKKPLKHISKWKSIAECLSMKPDITIQHEKGISLQIPVFILKGNALADKLATQGSYVVNAGKRTADGSEFEKRTADGSEFESPKKKAKVE

SEQ ID NO: 7654 - protein, 2211 aa, synthetic construct
MPAAKRVKLDGGDKKYSIGLDIGTNSVGWAVITDEYKVPSKKFKVLGNTDRHSIKKNLIGALLFDSGETAEATRLKRTARRRYTRRKNRICYLQEIFSNEMAKVDDSFFHRLEESFLVEEDKKHERHPIFGNIVDEVAYHEKYPTIYHLRKKLVDSTDKADLRLIYLALAHMIKFRGHFLIEGDLNPDNSDVDKLFIQLVQTYNQLFEENPINASGVDAKAILSARLSKSRRLENLIAQLPGEKKNGLFGNLIALSLGLTPNFKSNFDLAEDAKLQLSKDTYDDDLDNLLAQIGDQYADLFLAAKNLSDAILLSDILRVNTEITKAPLSASMIKRYDEHHQDLTLLKALVRQQLPEKYKEIFFDQSKNGYAGYIDGGASQEEFYKFIKPILEKMDGTEELLVKLNREDLLRKQRTFDNGSIPHQIHLGELHAILRRQEDFYPFLKDNREKIEKILTFRIPYYVGPLARGNSRFAWMTRKSEETITPWNFEEVVDKGASAQSFIERMTNFDKNLPNEKVLPKHSLLYEYFTVYNELTKVKYVTEGMRKPAFLSGEQKKAIVDLLFKTNRKVTVKQLKEDYFKKIECFDSVEISGVEDRFNASLGTYHDLLKIIKDKDFLDNEENEDILEDIVLTLTLFEDREMIEERLKTYAHLFDDKVMKQLKRRRYTGWGRLSRKLINGIRDKQSGKTILDFLKSDGFANRNFMQLIHDDSLTFKEDIQKAQVSGQGDSLHEHIANLAGSPAIKKGILQTVKVVDELVKVMGRHKPENIVIEMARENQTTQKGQKNSRERMKRIEEGIKELGSQILKEHPVENTQLQNEKLYLYYLQNGRDMYVDQELDINRLSDYDVDHIVPQSFLKDDSIDNKVLTRSDKARGKSDNVPSEEVVKKMKNYWRQLLNAKLITQRKFDNLTKAERGGLSELDKAGFIKRQLVETRQITKHVAQILDSRMNTKYDENDKLIREVKVITLKSKLVSDFRKDFQFYKVREINNYHHAHDAYLNAVVGTALIKKYPKLESEFVYGDYKVYDVRKMIAKSEQEIGKATAKYFFYSNIMNFFKTEITLANGEIRKRPLIETNGETGEIVWDKGRDFATVRKVLSMPQVNIVKKTEVQTGGFSKESILPKRNSDKLIARKKDWDPKKYGGFDSPTVAYSVLVVAKVEKGKSKKLKSVKELLGITIMERSSFEKNPIDFLEAKGYKEVKKDLIIKLPKYSLFELENGRKRMLASAGELQKGNELALPSKYVNFLYLASHYEKLKGSPEDNEQKQLFVEQHKHYLDEIIEQISEFSKRVILADANLDKVLSAYNKHRDKPIREQAENIIHLFTLTNLGAPAAFKYFDTTIDRKRYTSTKEVLDATLIHQSITGLYETRIDLSQLGGDGGAEAAAKEAAAKEAAAKEAAAKALEAEAAAKEAAAKEAAAKEAAAKAGGMNPLQLLQPLPAEIKGTKLLAHWNSGATITCIPESFLEDEQPIKKTLIKTIHGEKQQNVYYVTFKVKGRKVEAEVIASPYEYILLSPTDVPWLTQQPLQLTILVPLQEYQEKILSKTALPEDQKQQLKTLFVKYDNLWQHWENQVGHRKIRPHNIATGDYPPRPQKQYPINPKAKPSIQIVIDDLLKQGVLTPQNSTMNTPVYPVPKPDGRWRMVLDYREVNKTIPLTAAQNQHSAGILATIVRQKYKTTLDLANGFWAHPITPESYWLTAFTWQGKQYCWTRLPQGFLNSPALFNADVVDLLKEIPNVQVYVDDIYLSHDDPKEHVQQLEKVFQILLQAGYVVSLKKSEIGQKTVEFLGFNITKEGRGLTDTFKTKLLNITPPKDLKQLQSILGKLNFARNFIPNFAELVQPLYNLIAPAKGKYIEWSEENTKQLNMVIEALNTASNLEERLPEQRLVIKVNTSPSAGYVRYYNETGKKPIMYLNYVFSKAELKFSMLEKLLTTMHKALIKAMDLAMGQEILVYSPIVSMTKIQKTPLPERKALPIRWITWMTYLEDPRIQFHYDKTLPELKHIPDVYTSSQSPVKHPSQYEGVFYTDGSAIKSPDPTKSNNAGMGIVHATYKPEYQVLNQWSIPLGNHTAQMAEIAAVEFACKKALKIPGPVLVITDSFYVAESANKELPYWKSNGFVNNKKKPLKHISKWKSIAECLSMKPDITIQHEKGISLQIPVFILKGNALADKLATQGSYVVNAGKRTADGSEFEKRTADGSEFESPKKKAKVE

SEQ ID NO: 7655 - protein, 2162 aa, synthetic construct
MPAAKRVKLDGGDKKYSIGLDIGTNSVGWAVITDEYKVPSKKFKVLGNTDRHSIKKNLIGALLFDSGETAEATRLKRTARRRYTRRKNRICYLQEIFSNEMAKVDDSFFHRLEESFLVEEDKKHERHPIFGNIVDEVAYHEKYPTIYHLRKKLVDSTDKADLRLIYLALAHMIKFRGHFLIEGDLNPDNSDVDKLFIQLVQTYNQLFEENPINASGVDAKAILSARLSKSRRLENLIAQLPGEKKNGLFGNLIALSLGLTPNFKSNFDLAEDAKLQLSKDTYDDDLDNLLAQIGDQYADLFLAAKNLSDAILLSDILRVNTEITKAPLSASMIKRYDEHHQDLTLLKALVRQQLPEKYKEIFFDQSKNGYAGYIDGGASQEEFYKFIKPILEKMDGTEELLVKLNREDLLRKQRTFDNGSIPHQIHLGELHAILRRQEDFYPFLKDNREKIEKILTFRIPYYVGPLARGNSRFAWMTRKSEETITPWNFEEVVDKGASAQSFIERMTNFDKNLPNEKVLPKHSLLYEYFTVYNELTKVKYVTEGMRKPAFLSGEQKKAIVDLLFKTNRKVTVKQLKEDYFKKIECFDSVEISGVEDRFNASLGTYHDLLKIIKDKDFLDNEENEDILEDIVLTLTLFEDREMIEERLKTYAHLFDDKVMKQLKRRRYTGWGRLSRKLINGIRDKQSGKTILDFLKSDGFANRNFMQLIHDDSLTFKEDIQKAQVSGQGDSLHEHIANLAGSPAIKKGILQTVKVVDELVKVMGRHKPENIVIEMARENQTTQKGQKNSRERMKRIEEGIKELGSQILKEHPVENTQLQNEKLYLYYLQNGRDMYVDQELDINRLSDYDVDHIVPQSFLKDDSIDNKVLTRSDKARGKSDNVPSEEVVKKMKNYWRQLLNAKLITQRKFDNLTKAERGGLSELDKAGFIKRQLVETRQITKHVAQILDSRMNTKYDENDKLIREVKVITLKSKLVSDFRKDFQFYKVREINNYHHAHDAYLNAVVGTALIKKYPKLESEFVYGDYKVYDVRKMIAKSEQEIGKATAKYFFYSNIMNFFKTEITLANGEIRKRPLIETNGETGEIVWDKGRDFATVRKVLSMPQVNIVKKTEVQTGGFSKESILPKRNSDKLIARKKDWDPKKYGGFDSPTVAYSVLVVAKVEKGKSKKLKSVKELLGITIMERSSFEKNPIDFLEAKGYKEVKKDLIIKLPKYSLFELENGRKRMLASAGELQKGNELALPSKYVNFLYLASHYEKLKGSPEDNEQKQLFVEQHKHYLDEIIEQISEFSKRVILADANLDKVLSAYNKHRDKPIREQAENIIHLFTLTNLGAPAAFKYFDTTIDRKRYTSTKEVLDATLIHQSITGLYETRIDLSQLGGDGGAEAAAKEAAAKEAAAKEAAAKALEAEAAAKEAAAKEAAAKEAAAKAGGLLGRDLLTKLKAQIQFSTEGPQVTWEDRPAMCLVLNLEEEYRLHEKPVPPSIDPSWLQLFPMVWAEKAGMGLANQVPPVVVELKSDASPVAVRQYPMSKEAREGIRPHIQRFLDLGILVPCQSPWNTPLLPVKKPGTNDYRPVQDLREVNKRVQDIHPTVPNPYNLLSSLPPSHTWYSVLDLKDAFFCLKLHPNSQPLFAFEWRDPEKGNTGQLTWTRLPQGFKNSPTLFDEALHRDLASFRALNPQVVMLQYVDDLLVAAPTYRDCKEGTRRLLQELSKLGYRVSAKKAQLCREEVTYLGYLLKGGKRWLTPARKATVMKIPTPTTPRQVREFLGTAGFCRLWIPGFASLAAPLYPLTREKVPFTWTEAHQEAFGRIKEALLSAPALALPDLTKPFALYVDEKEGVARGVLTQTLGPWRRPVAYLSKKLDPVASGWPTCLKAIAAVALLLKDADKLTLGQNVLVIAPHNLESIVRQPPDRWMTNARMTHYQSLLLNERVSFAPPAILNPATLLPVESDDTPIHICSEILAEETGTRPDLRDQPLPGVPAWYTDGSSFIMDGRRQAGAAIVDNKRTVWASNLPEGTSAQKAELIALTQALRLAEGKSINIYTDSRYAFATAHVHGAIYKQRGLLTSAGKDIKNKEEILALLEAIHLPKRVAIIHCPGHQRGTDPVATGNRKADEAAKQAAQSTRILTETTKNAGKRTADGSEFEKRTADGSEFESPKKKAKVE

SEQ ID NO: 7656 - protein, 2253 aa, synthetic construct
MPAAKRVKLDGGDKKYSIGLDIGTNSVGWAVITDEYKVPSKKFKVLGNTDRHSIKKNLIGALLFDSGETAEATRLKRTARRRYTRRKNRICYLQEIFSNEMAKVDDSFFHRLEESFLVEEDKKHERHPIFGNIVDEVAYHEKYPTIYHLRKKLVDSTDKADLRLIYLALAHMIKFRGHFLIEGDLNPDNSDVDKLFIQLVQTYNQLFEENPINASGVDAKAILSARLSKSRRLENLIAQLPGEKKNGLFGNLIALSLGLTPNFKSNFDLAEDAKLQLSKDTYDDDLDNLLAQIGDQYADLFLAAKNLSDAILLSDILRVNTEITKAPLSASMIKRYDEHHQDLTLLKALVRQQLPEKYKEIFFDQSKNGYAGYIDGGASQEEFYKFIKPILEKMDGTEELLVKLNREDLLRKQRTFDNGSIPHQIHLGELHAILRRQEDFYPFLKDNREKIEKILTFRIPYYVGPLARGNSRFAWMTRKSEETITPWNFEEVVDKGASAQSFIERMTNFDKNLPNEKVLPKHSLLYEYFTVYNELTKVKYVTEGMRKPAFLSGEQKKAIVDLLFKTNRKVTVKQLKEDYFKKIECFDSVEISGVEDRFNASLGTYHDLLKIIKDKDFLDNEENEDILEDIVLTLTLFEDREMIEERLKTYAHLFDDKVMKQLKRRRYTGWGRLSRKLINGIRDKQSGKTILDFLKSDGFANRNFMQLIHDDSLTFKEDIQKAQVSGQGDSLHEHIANLAGSPAIKKGILQTVKVVDELVKVMGRHKPENIVIEMARENQTTQKGQKNSRERMKRIEEGIKELGSQILKEHPVENTQLQNEKLYLYYLQNGRDMYVDQELDINRLSDYDVDHIVPQSFLKDDSIDNKVLTRSDKARGKSDNVPSEEVVKKMKNYWRQLLNAKLITQRKFDNLTKAERGGLSELDKAGFIKRQLVETRQITKHVAQILDSRMNTKYDENDKLIREVKVITLKSKLVSDFRKDFQFYKVREINNYHHAHDAYLNAVVGTALIKKYPKLESEFVYGDYKVYDVRKMIAKSEQEIGKATAKYFFYSNIMNFFKTEITLANGEIRKRPLIETNGETGEIVWDKGRDFATVRKVLSMPQVNIVKKTEVQTGGFSKESILPKRNSDKLIARKKDWDPKKYGGFDSPTVAYSVLVVAKVEKGKSKKLKSVKELLGITIMERSSFEKNPIDFLEAKGYKEVKKDLIIKLPKYSLFELENGRKRMLASAGELQKGNELALPSKYVNFLYLASHYEKLKGSPEDNEQKQLFVEQHKHYLDEIIEQISEFSKRVILADANLDKVLSAYNKHRDKPIREQAENIIHLFTLTNLGAPAAFKYFDTTIDRKRYTSTKEVLDATLIHQSITGLYETRIDLSQLGGDGGAEAAAKEAAAKEAAAKEAAAKALEAEAAAKEAAAKEAAAKEAAAKAGGTLGDQGSRGSDPLPEPRVTLTVEGIPTEFLVNTGAEHSVLTKPMGKMGSKRTVVAGATGSKVYPWTTKRLLKIGQKQVTHSFLVIPECPAPLLGRDLLTKLKAQIQFSTEGPQVTWEDRPAMCLVLNLEEEYRLHEKPVPPSIDPSWLQLFPMVWAEKAGMGLANQVPPVVVELKSDASPVAVRQYPMSKEAREGIRPHIQRFLDLGILVPCQSPWNTPLLPVKKPGTNDYRPVQDLREVNKRVQDIHPTVPNPYNLLSSLPPSHTWYSVLDLKDAFFCLKLHPNSQPLFAFEWRDPEKGNTGQLTWTRLPQGFKNSPTLFNEALHRDLASFRALNPQVVMLQYVDDLLVAAPTYRDCKEGTRRLLQELSKLGYRVSAKKAQLCREEVTYLGYLLKGGKRWLTPARKATVMKIPTPTTPRQVREFLGTAGFCRLWIPGFASLAAPLYPLTRPKVPFTWTEAHQEAFGRIKEALLSAPALALPDLTKPFALYVDEKEGVARGVLTQTLGPWRRPVAYLSKKLDPVASGWPTCLKAIAAVALLLKDADKLTLGQNVLVIAPHNLESIVRQPPDRWMTNARMTHYQSLLLNERVSFAPPAILNPATLLPVESDDTPIHICSEILAEETGTRPDLRDQPLPGVPAWYTDGSSFIMDGRRQAGAAIVDNKRTVWASNLPEGTSAQKAELIALTQALRLAEGKSINIYTDSRYAFATAHVHGAIYKQRGWLTSAGKDIKNKEEILALLEAIHLPKRVAIIHCPGHQRGTDPVATGNRKADEAAKQAAQSTRILTETTKNAGKRTADGSEFEKRTADGSEFESPKKKAKVE

SEQ ID NO: 7657 - protein, 2131 aa, synthetic construct
MPAAKRVKLDGGDKKYSIGLDIGTNSVGWAVITDEYKVPSKKFKVLGNTDRHSIKKNLIGALLFDSGETAEATRLKRTARRRYTRRKNRICYLQEIFSNEMAKVDDSFFHRLEESFLVEEDKKHERHPIFGNIVDEVAYHEKYPTIYHLRKKLVDSTDKADLRLIYLALAHMIKFRGHFLIEGDLNPDNSDVDKLFIQLVQTYNQLFEENPINASGVDAKAILSARLSKSRRLENLIAQLPGEKKNGLFGNLIALSLGLTPNFKSNFDLAEDAKLQLSKDTYDDDLDNLLAQIGDQYADLFLAAKNLSDAILLSDILRVNTEITKAPLSASMIKRYDEHHQDLTLLKALVRQQLPEKYKEIFFDQSKNGYAGYIDGGASQEEFYKFIKPILEKMDGTEELLVKLNREDLLRKQRTFDNGSIPHQIHLGELHAILRRQEDFYPFLKDNREKIEKILTFRIPYYVGPLARGNSRFAWMTRKSEETITPWNFEEVVDKGASAQSFIERMTNFDKNLPNEKVLPKHSLLYEYFTVYNELTKVKYVTEGMRKPAFLSGEQKKAIVDLLFKTNRKVTVKQLKEDYFKKIECFDSVEISGVEDRFNASLGTYHDLLKIIKDKDFLDNEENEDILEDIVLTLTLFEDREMIEERLKTYAHLFDDKVMKQLKRRRYTGWGRLSRKLINGIRDKQSGKTILDFLKSDGFANRNFMQLIHDDSLTFKEDIQKAQVSGQGDSLHEHIANLAGSPAIKKGILQTVKVVDELVKVMGRHKPENIVIEMARENQTTQKGQKNSRERMKRIEEGIKELGSQILKEHPVENTQLQNEKLYLYYLQNGRDMYVDQELDINRLSDYDVDHIVPQSFLKDDSIDNKVLTRSDKARGKSDNVPSEEVVKKMKNYWRQLLNAKLITQRKFDNLTKAERGGLSELDKAGFIKRQLVETRQITKHVAQILDSRMNTKYDENDKLIREVKVITLKSKLVSDFRKDFQFYKVREINNYHHAHDAYLNAVVGTALIKKYPKLESEFVYGDYKVYDVRKMIAKSEQEIGKATAKYFFYSNIMNFFKTEITLANGEIRKRPLIETNGETGEIVWDKGRDFATVRKVLSMPQVNIVKKTEVQTGGFSKESILPKRNSDKLIARKKDWDPKKYGGFDSPTVAYSVLVVAKVEKGKSKKLKSVKELLGITIMERSSFEKNPIDFLEAKGYKEVKKDLIIKLPKYSLFELENGRKRMLASAGELQKGNELALPSKYVNFLYLASHYEKLKGSPEDNEQKQLFVEQHKHYLDEIIEQISEFSKRVILADANLDKVLSAYNKHRDKPIREQAENIIHLFTLTNLGAPAAFKYFDTTIDRKRYTSTKEVLDATLIHQSITGLYETRIDLSQLGGDGGAEAAAKEAAAKEAAAKEAAAKALEAEAAAKEAAAKEAAAKEAAAKAGGTLNLEDEYRLYETSAEPEVSPGSTWLSDFPQAWAETGGMGLAVRQAPLIIPLKATSTPVSIKQYPMSQEAKLGIKPHIQRLLDQGILVPCQSPWNTPLLPVKKPGTNDYRPVQDLREVNKRVEDIHPTVPNPYNLLSGLPPSHRWYTVLDLKDAFFCLRLHPTSQPLFAFEWRDPGMGISGQLTWTRLPQGFKNSPTLFNEALHRDLADFRIQHPDLILLQYVDDILLAATSELDCQQGTRALLLTLGNLGYRASAKKAQLCQKQVKYLGYLLKEGQRWLTEARKETVMGQPTPKTPRQLREFLGTAGFCRLWIPGFAEMAAPLYPLTKPGTLFNWGPDQQKAYQEIKQALLTAPALGLPDLTKPFELFVDEKQGYAKGVLTQKLGPWRRPVAYLSKKLDPVAAGWPPCLRMVAAIAVLRKDAGKLTMGQPLVILAPHAVEALVKQPPDRWLSNARMTHYQAMLLDTDRVQFGPVVALNPATLLPLPEEGAPHDCLEILAETHGTRPDLTDQPIPDADHTWYTDGSSFLQEGQRKAGAAVTTETEVIWARALPAGTSAQRAELIALTQALKMAEGKRLNVYTDSRYAFATAHIHGEIYRRRGWLTSEGREIKNKSEILALLKALFLPKRLSIIHCLGHQKGDSAEARGNRLADQAAREAAIKTPPDTSTLLAGKRTADGSEFEKRTADGSEFESPKKKAKVE

SEQ ID NO: 7658 - protein, 2131 aa, synthetic construct
MPAAKRVKLDGGDKKYSIGLDIGTNSVGWAVITDEYKVPSKKFKVLGNTDRHSIKKNLIGALLFDSGETAEATRLKRTARRRYTRRKNRICYLQEIFSNEMAKVDDSFFHRLEESFLVEEDKKHERHPIFGNIVDEVAYHEKYPTIYHLRKKLVDSTDKADLRLIYLALAHMIKFRGHFLIEGDLNPDNSDVDKLFIQLVQTYNQLFEENPINASGVDAKAILSARLSKSRRLENLIAQLPGEKKNGLFGNLIALSLGLTPNFKSNFDLAEDAKLQLSKDTYDDDLDNLLAQIGDQYADLFLAAKNLSDAILLSDILRVNTEITKAPLSASMIKRYDEHHQDLTLLKALVRQQLPEKYKEIFFDQSKNGYAGYIDGGASQEEFYKFIKPILEKMDGTEELLVKLNREDLLRKQRTFDNGSIPHQIHLGELHAILRRQEDFYPFLKDNREKIEKILTFRIPYYVGPLARGNSRFAWMTRKSEETITPWNFEEVVDKGASAQSFIERMTNFDKNLPNEKVLPKHSLLYEYFTVYNELTKVKYVTEGMRKPAFLSGEQKKAIVDLLFKTNRKVTVKQLKEDYFKKIECFDSVEISGVEDRFNASLGTYHDLLKIIKDKDFLDNEENEDILEDIVLTLTLFEDREMIEERLKTYAHLFDDKVMKQLKRRRYTGWGRLSRKLINGIRDKQSGKTILDFLKSDGFANRNFMQLIHDDSLTFKEDIQKAQVSGQGDSLHEHIANLAGSPAIKKGILQTVKVVDELVKVMGRHKPENIVIEMARENQTTQKGQKNSRERMKRIEEGIKELGSQILKEHPVENTQLQNEKLYLYYLQNGRDMYVDQELDINRLSDYDVDHIVPQSFLKDDSIDNKVLTRSDKARGKSDNVPSEEVVKKMKNYWRQLLNAKLITQRKFDNLTKAERGGLSELDKAGFIKRQLVETRQITKHVAQILDSRMNTKYDENDKLIREVKVITLKSKLVSDFRKDFQFYKVREINNYHHAHDAYLNAVVGTALIKKYPKLESEFVYGDYKVYDVRKMIAKSEQEIGKATAKYFFYSNIMNFFKTEITLANGEIRKRPLIETNGETGEIVWDKGRDFATVRKVLSMPQVNIVKKTEVQTGGFSKESILPKRNSDKLIARKKDWDPKKYGGFDSPTVAYSVLVVAKVEKGKSKKLKSVKELLGITIMERSSFEKNPIDFLEAKGYKEVKKDLIIKLPKYSLFELENGRKRMLASAGELQKGNELALPSKYVNFLYLASHYEKLKGSPEDNEQKQLFVEQHKHYLDEIIEQISEFSKRVILADANLDKVLSAYNKHRDKPIREQAENIIHLFTLTNLGAPAAFKYFDTTIDRKRYTSTKEVLDATLIHQSITGLYETRIDLSQLGGDGGAEAAAKEAAAKEAAAKEAAAKALEAEAAAKEAAAKEAAAKEAAAKAGGTLNIEDEYRLHETSKEPDVSLGSTWLSDFPQAWAETGGMGLAVRQAPLIIPLKATSTPVSIKQYPMSQEARLGIKPHIQRLLDQGILVPCQSPWNTPLLPVKKPGTNDYRPVQDLREVNKRVEDIHPTVPNPYNLLSGLPPSHQWYTVLDLKDAFFCLRLHPTSQPLFAFEWRDPEMGISGQLTWTRLPQGFKNSPTLFNEALHRDLAGFRIQHPDLILLQYVDDLLLAATSELDCQQGTRALLQTLGDLGYRASAKKAQICQKQVKYLGYLLKEGQRWLTEARKETVMGQPIPKTPRQLREFLGTAGFCRLWIPGFAEMAAPLYPLTKPGTLFNWGPDQQKAFQEIKQALLTAPALGLPDLTKPFELFVDEKQGYAKGVLTQKLGPWRRPVAYLSKKLDPVAAGWPPCLRMVAAIAVLTKDAGKLTMGQPLVILAPHAVEALVKQPPDRWLSNARMTHYQALLLDTDRVQFGPVVALNPATLLPLPEEGLQHDCLDILAEAHGTRSDLMDQPLPDADHTWYTDGSSFLQEGQRKAGAAVTTETEVIWARALPAGTSAQRAELIALTQALKMAEGKKLNVYTDSRYAFATAHIHGEIYRRRGWLTSEGKEIKNKDEILALLKALFLPKRLSIIHCPGHQKGNSAEARGNRMADQAAREVATRETPETSTLLAGKRTADGSEFEKRTADGSEFESPKKKAKVE

SEQ ID NO: 7659 - protein, 2131 aa, synthetic construct
MPAAKRVKLDGGDKKYSIGLDIGTNSVGWAVITDEYKVPSKKFKVLGNTDRHSIKKNLIGALLFDSGETAEATRLKRTARRRYTRRKNRICYLQEIFSNEMAKVDDSFFHRLEESFLVEEDKKHERHPIFGNIVDEVAYHEKYPTIYHLRKKLVDSTDKADLRLIYLALAHMIKFRGHFLIEGDLNPDNSDVDKLFIQLVQTYNQLFEENPINASGVDAKAILSARLSKSRRLENLIAQLPGEKKNGLFGNLIALSLGLTPNFKSNFDLAEDAKLQLSKDTYDDDLDNLLAQIGDQYADLFLAAKNLSDAILLSDILRVNTEITKAPLSASMIKRYDEHHQDLTLLKALVRQQLPEKYKEIFFDQSKNGYAGYIDGGASQEEFYKFIKPILEKMDGTEELLVKLNREDLLRKQRTFDNGSIPHQIHLGELHAILRRQEDFYPFLKDNREKIEKILTFRIPYYVGPLARGNSRFAWMTRKSEETITPWNFEEVVDKGASAQSFIERMTNFDKNLPNEKVLPKHSLLYEYFTVYNELTKVKYVTEGMRKPAFLSGEQKKAIVDLLFKTNRKVTVKQLKEDYFKKIECFDSVEISGVEDRFNASLGTYHDLLKIIKDKDFLDNEENEDILEDIVLTLTLFEDREMIEERLKTYAHLFDDKVMKQLKRRRYTGWGRLSRKLINGIRDKQSGKTILDFLKSDGFANRNFMQLIHDDSLTFKEDIQKAQVSGQGDSLHEHIANLAGSPAIKKGILQTVKVVDELVKVMGRHKPENIVIEMARENQTTQKGQKNSRERMKRIEEGIKELGSQILKEHPVENTQLQNEKLYLYYLQNGRDMYVDQELDINRLSDYDVDHIVPQSFLKDDSIDNKVLTRSDKARGKSDNVPSEEVVKKMKNYWRQLLNAKLITQRKFDNLTKAERGGLSELDKAGFIKRQLVETRQITKHVAQILDSRMNTKYDENDKLIREVKVITLKSKLVSDFRKDFQFYKVREINNYHHAHDAYLNAVVGTALIKKYPKLESEFVYGDYKVYDVRKMIAKSEQEIGKATAKYFFYSNIMNFFKTEITLANGEIRKRPLIETNGETGEIVWDKGRDFATVRKVLSMPQVNIVKKTEVQTGGFSKESILPKRNSDKLIARKKDWDPKKYGGFDSPTVAYSVLVVAKVEKGKSKKLKSVKELLGITIMERSSFEKNPIDFLEAKGYKEVKKDLIIKLPKYSLFELENGRKRMLASAGELQKGNELALPSKYVNFLYLASHYEKLKGSPEDNEQKQLFVEQHKHYLDEIIEQISEFSKRVILADANLDKVLSAYNKHRDKPIREQAENIIHLFTLTNLGAPAAFKYFDTTIDRKRYTSTKEVLDATLIHQSITGLYETRIDLSQLGGDGGAEAAAKEAAAKEAAAKEAAAKALEAEAAAKEAAAKEAAAKEAAAKAGGTLNIEDEYRLHETSKGPDVPLGSTWLSDFPQAWAETGGMGLAFRQAPLIISLKATSTPVSIKQYPMSQEARLGIKPHIQRLLDQGILVPCQSPWNTPLLPVKKPGTNDYRPVQDLREVNKRVEDIHPTVPNPYNLLSGLPPSHQWYTVLDLKDAFFCLRLHPTSQSLFAFEWKDPEMGISGQLTWTRLPQGFKNSPTLFNEALHRDLADFRIQHPDLILLQYVDDLLLAATSELDCQQGTRALLQTLGDLGYRASAKKAQICQKQVKYLGYLLKEGQRWLTEARKETVMGQPTPKTPRQLREFLGKAGLCRLFIPGFAEMAAPLYPLTKPGTLFKWGPDQQKAYQEIKQALLTAPALGLPDLTKPFELFVDEKQGYAKGVLTQKLGPWRRPVAYLSKKLDPVAAGWPPCLRMVAAIAVLTKDVGKLTMGQPLVILAPHAVEALVKQPPDRWLSNARMTHYQALLLDTDRVQFGPIVALNPATLLPLPEEGLQHDCLDILAEAHGTRPDLTDQPLPDADHTWYTDGSSFLQEGQRRAGAAVTTETEVIWAKALPAGTSAQRAELIALTQALKMAAGKKLNVYTDSRYAFATAHIHGEIYRRRGWLTSEGKEIKNKDEILALLKALFLPKRLSIIHCPGHQKGNHAEARGNRMADQAAREVATRETPETSTLLAGKRTADGSEFEKRTADGSEFESPKKKAKVE

SEQ ID NO: 7660 - protein, 2131 aa, synthetic construct; identical to SEQ ID NO: 4540

SEQ ID NO: 7661 - protein, 2151 aa, synthetic construct
MPAAKRVKLDGGDKKYSIGLDIGTNSVGWAVITDEYKVPSKKFKVLGNTDRHSIKKNLIGALLFDSGETAEATRLKRTARRRYTRRKNRICYLQEIFSNEMAKVDDSFFHRLEESFLVEEDKKHERHPIFGNIVDEVAYHEKYPTIYHLRKKLVDSTDKADLRLIYLALAHMIKFRGHFLIEGDLNPDNSDVDKLFIQLVQTYNQLFEENPINASGVDAKAILSARLSKSRRLENLIAQLPGEKKNGLFGNLIALSLGLTPNFKSNFDLAEDAKLQLSKDTYDDDLDNLLAQIGDQYADLFLAAKNLSDAILLSDILRVNTEITKAPLSASMIKRYDEHHQDLTLLKALVRQQLPEKYKEIFFDQSKNGYAGYIDGGASQEEFYKFIKPILEKMDGTEELLVKLNREDLLRKQRTFDNGSIPHQIHLGELHAILRRQEDFYPFLKDNREKIEKILTFRIPYYVGPLARGNSRFAWMTRKSEETITPWNFEEVVDKGASAQSFIERMTNFDKNLPNEKVLPKHSLLYEYFTVYNELTKVKYVTEGMRKPAFLSGEQKKAIVDLLFKTNRKVTVKQLKEDYFKKIECFDSVEISGVEDRFNASLGTYHDLLKIIKDKDFLDNEENEDILEDIVLTLTLFEDREMIEERLKTYAHLFDDKVMKQLKRRRYTGWGRLSRKLINGIRDKQSGKTILDFLKSDGFANRNFMQLIHDDSLTFKEDIQKAQVSGQGDSLHEHIANLAGSPAIKKGILQTVKVVDELVKVMGRHKPENIVIEMARENQTTQKGQKNSRERMKRIEEGIKELGSQILKEHPVENTQLQNEKLYLYYLQNGRDMYVDQELDINRLSDYDVDHIVPQSFLKDDSIDNKVLTRSDKARGKSDNVPSEEVVKKMKNYWRQLLNAKLITQRKFDNLTKAERGGLSELDKAGFIKRQLVETRQITKHVAQILDSRMNTKYDENDKLIREVKVITLKSKLVSDFRKDFQFYKVREINNYHHAHDAYLNAVVGTALIKKYPKLESEFVYGDYKVYDVRKMIAKSEQEIGKATAKYFFYSNIMNFFKTEITLANGEIRKRPLIETNGETGEIVWDKGRDFATVRKVLSMPQVNIVKKTEVQTGGFSKESILPKRNSDKLIARKKDWDPKKYGGFDSPTVAYSVLVVAKVEKGKSKKLKSVKELLGITIMERSSFEKNPIDFLEAKGYKEVKKDLIIKLPKYSLFELENGRKRMLASAGELQKGNELALPSKYVNFLYLASHYEKLKGSPEDNEQKQLFVEQHKHYLDEIIEQISEFSKRVILADANLDKVLSAYNKHRDKPIREQAENIIHLFTLTNLGAPAAFKYFDTTIDRKRYTSTKEVLDATLIHQSITGLYETRIDLSQLGGDGGAEAAAKEAAAKEAAAKEAAAKALEAEAAAKEAAAKEAAAKEAAAKAGGWVQEISDSRPMLHIYLNGRRFLGLLNTGADKTCIAGRDWPANWPIHQTESSLQGLGMACGVARSSQPLRWQHEDKSGIIHPFVIPTLPFTLWGRDIMKDIKVRLMTDSPDDSQDLMIGAIESNLFADQISWKSDQPVWLNQWPLKQEKLQALQQLVTEQLQLGHLEESNSPWNTPVFVIKKKSGKWRLLQDLRAVNATMHDMGALQPGLPSPVAVPKGWEIIIIDLQDCFFNIKLHPEDCKRFAFSVPSPNFKRPYQRFQWKVLPQGMKNSPTLCQKFVDKAILTVRDKYQDSYIVHYMDDILLAHPSRSIVDEILTSMIQALNKHGLVVSTEKIQKYDNLKYLGTHIQGDSVSYQKLQIRTDKLRTLNDFQKLLGNINWIRPFLKLTTGELKPLFEILNPDSNPISTRKLTPEACKALQLMNERLSTARVKRLDLSQPWSLCILKTEYTPTACLWQDGVVEWIHLPHISPKVITPYDIFCTQLIIKGRHRSKELFSKDPDYIVVPYTKVQFDLLLQEKEDWPISLLGFLGEVHFHLPKDPLLTFTLQTAIIFPHMTSTTPLEKGIVIFTDGSANGRSVTYIQGREPIIKENTQNTAQQAEIVAVITAFEEVSQPFNLYTDSKYVTGLFPEIETATLSPRTKIYTELKHLQRLIHKRQEKFYIGHIRGHTGLPGPLAQGNAYADSLTRILTAGKRTADGSEFEKRTADGSEFESPKKKAKVE

SEQ ID NO: 7662 - protein, 2122 aa, synthetic construct
MPAAKRVKLDGGDKKYSIGLDIGTNSVGWAVITDEYKVPSKKFKVLGNTDRHSIKKNLIGALLFDSGETAEATRLKRTARRRYTRRKNRICYLQEIFSNEMAKVDDSFFHRLEESFLVEEDKKHERHPIFGNIVDEVAYHEKYPTIYHLRKKLVDSTDKADLRLIYLALAHMIKFRGHFLIEGDLNPDNSDVDKLFIQLVQTYNQLFEENPINASGVDAKAILSARLSKSRRLENLIAQLPGEKKNGLFGNLIALSLGLTPNFKSNFDLAEDAKLQLSKDTYDDDLDNLLAQIGDQYADLFLAAKNLSDAILLSDILRVNTEITKAPLSASMIKRYDEHHQDLTLLKALVRQQLPEKYKEIFFDQSKNGYAGYIDGGASQEEFYKFIKPILEKMDGTEELLVKLNREDLLRKQRTFDNGSIPHQIHLGELHAILRRQEDFYPFLKDNREKIEKILTFRIPYYVGPLARGNSRFAWMTRKSEETITPWNFEEVVDKGASAQSFIERMTNFDKNLPNEKVLPKHSLLYEYFTVYNELTKVKYVTEGMRKPAFLSGEQKKAIVDLLFKTNRKVTVKQLKEDYFKKIECFDSVEISGVEDRFNASLGTYHDLLKIIKDKDFLDNEENEDILEDIVLTLTLFEDREMIEERLKTYAHLFDDKVMKQLKRRRYTGWGRLSRKLINGIRDKQSGKTILDFLKSDGFANRNFMQLIHDDSLTFKEDIQKAQVSGQGDSLHEHIANLAGSPAIKKGILQTVKVVDELVKVMGRHKPENIVIEMARENQTTQKGQKNSRERMKRIEEGIKELGSQILKEHPVENTQLQNEKLYLYYLQNGRDMYVDQELDINRLSDYDVDHIVPQSFLKDDSIDNKVLTRSDKARGKSDNVPSEEVVKKMKNYWRQLLNAKLITQRKFDNLTKAERGGLSELDKAGFIKRQLVETRQITKHVAQILDSRMNTKYDENDKLIREVKVITLKSKLVSDFRKDFQFYKVREINNYHHAHDAYLNAVVGTALIKKYPKLESEFVYGDYKVYDVRKMIAKSEQEIGKATAKYFFYSNIMNFFKTEITLANGEIRKRPLIETNGETGEIVWDKGRDFATVRKVLSMPQVNIVKKTEVQTGGFSKESILPKRNSDKLIARKKDWDPKKYGGFDSPTVAYSVLVVAKVEKGKSKKLKSVKELLGITIMERSSFEKNPIDFLEAKGYKEVKKDLIIKLPKYSLFELENGRKRMLASAGELQKGNELALPSKYVNFLYLASHYEKLKGSPEDNEQKQLFVEQHKHYLDEIIEQISEFSKRVILADANLDKVLSAYNKHRDKPIREQAENIIHLFTLTNLGAPAAFKYFDTTIDRKRYTSTKEVLDATLIHQSITGLYETRIDLSQLGGDGGAEAAAKEAAAKEAAAKEAAAKALEAEAAAKEAAAKEAAAKEAAAKAGGVPWLMKKPLQLTVLVPLHEYQERLLQQTALPKEQKELLQKLFLKYDALWQHWENQVGHRRIKPHNIATGTLAPRPQKQYPINPKAKPSIQIVIDDLLKQGVLIQQNSTMNTPVYPVPKPDGKWRMVLDYREVNKTIPLIAAQNQHSAGILSSIYRGKYKTTLDLTNGFWAHPITPESYWLTAFTWQGKQYCWTRLPQGFLNSPALFTADVVDLLKEIPNVQAYVDDIYISHDDPQEHLEQLEKIFSILLNAGYVVSLKKSEIAQREVEFLGFNITKEGRGLTDTFKQKLLNITPPKDLKQLQSILGLLNFARNFIPNYSELVKPLYTIVANANGKFISWTEDNSNQLQHIISVLNQADNLEERNPETRLIIKVNSSPSAGYIRYYNEGSKRPIMYVNYIFSKAEAKFTQTEKLLTTMHKGLIKAMDLAMGQEILVYSPIVSMTKIQRTPLPERKALPVRWITWMTYLEDPRIQFHYDKSLPELQQIPNVTEDVIAKTKHPSEFAMVFYTDGSAIKHPDVNKSHSAGMGIAQVQFIPEYKIVHQWSIPLGDHTAQLAEIAAVEFACKKALKISGPVLIVTDSFYVAESANKELPYWKSNGFLNNKKKPLRHVSKWKSIAECLQLKPDIIIMHEKGHQQPMTTLHTEGNNLADKLATQGSYVVHAGKRTADGSEFEKRTADGSEFESPKKKAKVE

SEQ ID NO: 7663 - protein, 2122 aa, synthetic construct
MPAAKRVKLDGGDKKYSIGLDIGTNSVGWAVITDEYKVPSKKFKVLGNTDRHSIKKNLIGALLFDSGETAEATRLKRTARRRYTRRKNRICYLQEIFSNEMAKVDDSFFHRLEESFLVEEDKKHERHPIFGNIVDEVAYHEKYPTIYHLRKKLVDSTDKADLRLIYLALAHMIKFRGHFLIEGDLNPDNSDVDKLFIQLVQTYNQLFEENPINASGVDAKAILSARLSKSRRLENLIAQLPGEKKNGLFGNLIALSLGLTPNFKSNFDLAEDAKLQLSKDTYDDDLDNLLAQIGDQYADLFLAAKNLSDAILLSDILRVNTEITKAPLSASMIKRYDEHHQDLTLLKALVRQQLPEKYKEIFFDQSKNGYAGYIDGGASQEEFYKFIKPILEKMDGTEELLVKLNREDLLRKQRTFDNGSIPHQIHLGELHAILRRQEDFYPFLKDNREKIEKILTFRIPYYVGPLARGNSRFAWMTRKSEETITPWNFEEVVDKGASAQSFIERMTNFDKNLPNEKVLPKHSLLYEYFTVYNELTKVKYVTEGMRKPAFLSGEQKKAIVDLLFKTNRKVTVKQLKEDYFKKIECFDSVEISGVEDRFNASLGTYHDLLKIIKDKDFLDNEENEDILEDIVLTLTLFEDREMIEERLKTYAHLFDDKVMKQLKRRRYTGWGRLSRKLINGIRDKQSGKTILDFLKSDGFANRNFMQLIHDDSLTFKEDIQKAQVSGQGDSLHEHIANLAGSPAIKKGILQTVKVVDELVKVMGRHKPENIVIEMARENQTTQKGQKNSRERMKRIEEGIKELGSQILKEHPVENTQLQNEKLYLYYLQNGRDMYVDQELDINRLSDYDVDHIVPQSFLKDDSIDNKVLTRSDKARGKSDNVPSEEVVKKMKNYWRQLLNAKLITQRKFDNLTKAERGGLSELDKAGFIKRQLVETRQITKHVAQILDSRMNTKYDENDKLIREVKVITLKSKLVSDFRKDFQFYKVREINNYHHAHDAYLNAVVGTALIKKYPKLESEFVYGDYKVYDVRKMIAKSEQEIGKATAKYFFYSNIMNFFKTEITLANGEIRKRPLIETNGETGEIVWDKGRDFATVRKVLSMPQVNIVKKTEVQTGGFSKESILPKRNSDKLIARKKDWDPKKYGGFDSPTVAYSVLVVAKVEKGKSKKLKSVKELLGITIMERSSFEKNPIDFLEAKGYKEVKKDLIIKLPKYSLFELENGRKRMLASAGELQKGNELALPSKYVNFLYLASHYEKLKGSPEDNEQKQLFVEQHKHYLDEIIEQISEFSKRVILADANLDKVLSAYNKHRDKPIREQAENIIHLFTLTNLGAPAAFKYFDTTIDRKRYTSTKEVLDATLIHQSITGLYETRIDLSQLGGDGGAEAAAKEAAAKEAAAKEAAAKALEAEAAAKEAAAKEAAAKEAAAKAGGVPWLMKKPLQLTVLVPLHEYQERLLQQTALPKEQKELLQKLFLKYDALWQHWENQVGHRRIKPHNIATGTLAPRPQKQYPINPKAKPSIQIVIDDLLKQGVLIQQNSTMNTPVYPVPKPDGKWRMVLDYREVNKTIPLIAAQNQHSAGILSSIYRGKYKTTLDLTNGFWAHPITPESYWLTAFTWQGKQYCWTRLPQGFLNSPALFNADVVDLLKEIPNVQAYVDDIYISHDDPQEHLEQLEKIFSILLNAGYVVSLKKSEIAQREVEFLGFNITKEGRGLTDTFKQKLLNITPPKDLKQLQSILGLLNFARNFIPNYSELVKPLYTIVAPANGKFISWTEDNSNQLQHIISVLNQADNLEERNPETRLIIKVNSSPSAGYIRYYNEGSKRPIMYVNYIFSKAEAKFTQTEKLLTTMHKGLIKAMDLAMGQEILVYSPIVSMTKIQRTPLPERKALPVRWITWMTYLEDPRIQFHYDKSLPELQQIPNVTEDVIAKTKHPSEFAMVFYTDGSAIKHPDVNKSHSAGMGIAQVQFIPEYKIVHQWSIPLGDHTAQLAEIAAVEFACKKALKISGPVLIVTDSFYVAESANKELPYWKSNGFLNNKKKPLRHVSKWKSIAECLQLKPDIIIMHEKGHQQPMTTLHTEGNNLADKLATQGSYVVHAGKRTADGSEFEKRTADGSEFESPKKKAKVE

SEQ ID NO: 7664 - protein, 2122 aa, synthetic construct
MPAAKRVKLDGGDKKYSIGLDIGTNSVGWAVITDEYKVPSKKFKVLGNTDRHSIKKNLIGALLFDSGETAEATRLKRTARRRYTRRKNRICYLQEIFSNEMAKVDDSFFHRLEESFLVEEDKKHERHPIFGNIVDEVAYHEKYPTIYHLRKKLVDSTDKADLRLIYLALAHMIKFRGHFLIEGDLNPDNSDVDKLFIQLVQTYNQLFEENPINASGVDAKAILSARLSKSRRLENLIAQLPGEKKNGLFGNLIALSLGLTPNFKSNFDLAEDAKLQLSKDTYDDDLDNLLAQIGDQYADLFLAAKNLSDAILLSDILRVNTEITKAPLSASMIKRYDEHHQDLTLLKALVRQQLPEKYKEIFFDQSKNGYAGYIDGGASQEEFYKFIKPILEKMDGTEELLVKLNREDLLRKQRTFDNGSIPHQIHLGELHAILRRQEDFYPFLKDNREKIEKILTFRIPYYVGPLARGNSRFAWMTRKSEETITPWNFEEVVDKGASAQSFIERMTNFDKNLPNEKVLPKHSLLYEYFTVYNELTKVKYVTEGMRKPAFLSGEQKKAIVDLLFKTNRKVTVKQLKEDYFKKIECFDSVEISGVEDRFNASLGTYHDLLKIIKDKDFLDNEENEDILEDIVLTLTLFEDREMIEERLKTYAHLFDDKVMKQLKRRRYTGWGRLSRKLINGIRDKQSGKTILDFLKSDGFANRNFMQLIHDDSLTFKEDIQKAQVSGQGDSLHEHIANLAGSPAIKKGILQTVKVVDELVKVMGRHKPENIVIEMARENQTTQKGQKNSRERMKRIEEGIKELGSQILKEHPVENTQLQNEKLYLYYLQNGRDMYVDQELDINRLSDYDVDHIVPQSFLKDDSIDNKVLTRSDKARGKSDNVPSEEVVKKMKNYWRQLLNAKLITQRKFDNLTKAERGGLSELDKAGFIKRQLVETRQITKHVAQILDSRMNTKYDENDKLIREVKVITLKSKLVSDFRKDFQFYKVREINNYHHAHDAYLNAVVGTALIKKYPKLESEFVYGDYKVYDVRKMIAKSEQEIGKATAKYFFYSNIMNFFKTEITLANGEIRKRPLIETNGETGEIVWDKGRDFATVRKVLSMPQVNIVKKTEVQTGGFSKESILPKRNSDKLIARKKDWDPKKYGGFDSPTVAYSVLVVAKVEKGKSKKLKSVKELLGITIMERSSFEKNPIDFLEAKGYKEVKKDLIIKLPKYSLFELENGRKRMLASAGELQKGNELALPSKYVNFLYLASHYEKLKGSPEDNEQKQLFVEQHKHYLDEIIEQISEFSKRVILADANLDKVLSAYNKHRDKPIREQAENIIHLFTLTNLGAPAAFKYFDTTIDRKRYTSTKEVLDATLIHQSITGLYETRIDLSQLGGDGGAEAAAKEAAAKEAAAKEAAAKALEAEAAAKEAAAKEAAAKEAAAKAGGVPWLMKKPLQLTVLVPLHEYQERLLQQTALPKEQKELLQKLFLKYDALWQHWENQVGHRRIKPHNIATGTLAPRPQKQYPINPKAKPSIQIVIDDLLKQGVLIQQNSTMNTPVYPVPKPDGKWRMVLDYREVNKTIPLIAAQNQHSAGILSSIYRGKYKTTLDLTNGFWAHPITPESYWLTAFTWQGKQYCWTRLPQGFLNSPALFNADVVDLLKEIPNVQAYVDDIYISHDDPQEHLEQLEKIFSILLNAGYVVSLKKSEIAQREVEFLGFNITKEGRGLTDTFKQKLLNITPPKDLKQLQSILGKLNFARNFIPNYSELVKPLYTIVAPANGKFISWTEDNSNQLQHIISVLNQADNLEERNPETRLIIKVNSSPSAGYIRYYNEGSKRPIMYVNYIFSKAEAKFTQTEKLLTTMHKGLIKAMDLAMGQEILVYSPIVSMTKIQRTPLPERKALPVRWITWMTYLEDPRIQFHYDKSLPELQQIPNVTEDVIAKTKHPSEFAMVFYTDGSAIKHPDVNKSHSAGMGIAQVQFIPEYKIVHQWSIPLGDHTAQLAEIAAVEFACKKALKISGPVLIVTDSFYVAESANKELPYWKSNGFLNNKKKPLRHVSKWKSIAECLQLKPDIIIMHEKGHQQPMTTLHTEGNNLADKLATQGSYVVHAGKRTADGSEFEKRTADGSEFESPKKKAKVE

SEQ ID NO: 7665 - protein, 2211 aa, synthetic construct
MPAAKRVKLDGGDKKYSIGLDIGTNSVGWAVITDEYKVPSKKFKVLGNTDRHSIKKNLIGALLFDSGETAEATRLKRTARRRYTRRKNRICYLQEIFSNEMAKVDDSFFHRLEESFLVEEDKKHERHPIFGNIVDEVAYHEKYPTIYHLRKKLVDSTDKADLRLIYLALAHMIKFRGHFLIEGDLNPDNSDVDKLFIQLVQTYNQLFEENPINASGVDAKAILSARLSKSRRLENLIAQLPGEKKNGLFGNLIALSLGLTPNFKSNFDLAEDAKLQLSKDTYDDDLDNLLAQIGDQYADLFLAAKNLSDAILLSDILRVNTEITKAPLSASMIKRYDEHHQDLTLLKALVRQQLPEKYKEIFFDQSKNGYAGYIDGGASQEEFYKFIKPILEKMDGTEELLVKLNREDLLRKQRTFDNGSIPHQIHLGELHAILRRQEDFYPFLKDNREKIEKILTFRIPYYVGPLARGNSRFAWMTRKSEETITPWNFEEVVDKGASAQSFIERMTNFDKNLPNEKVLPKHSLLYEYFTVYNELTKVKYVTEGMRKPAFLSGEQKKAIVDLLFKTNRKVTVKQLKEDYFKKIECFDSVEISGVEDRFNASLGTYHDLLKIIKDKDFLDNEENEDILEDIVLTLTLFEDREMIEERLKTYAHLFDDKVMKQLKRRRYTGWGRLSRKLINGIRDKQSGKTILDFLKSDGFANRNFMQLIHDDSLTFKEDIQKAQVSGQGDSLHEHIANLAGSPAIKKGILQTVKVVDELVKVMGRHKPENIVIEMARENQTTQKGQKNSRERMKRIEEGIKELGSQILKEHPVENTQLQNEKLYLYYLQNGRDMYVDQELDINRLSDYDVDHIVPQSFLKDDSIDNKVLTRSDKARGKSDNVPSEEVVKKMKNYWRQLLNAKLITQRKFDNLTKAERGGLSELDKAGFIKRQLVETRQITKHVAQILDSRMNTKYDENDKLIREVKVITLKSKLVSDFRKDFQFYKVREINNYHHAHDAYLNAVVGTALIKKYPKLESEFVYGDYKVYDVRKMIAKSEQEIGKATAKYFFYSNIMNFFKTEITLANGEIRKRPLIETNGETGEIVWDKGRDFATVRKVLSMPQVNIVKKTEVQTGGFSKESILPKRNSDKLIARKKDWDPKKYGGFDSPTVAYSVLVVAKVEKGKSKKLKSVKELLGITIMERSSFEKNPIDFLEAKGYKEVKKDLIIKLPKYSLFELENGRKRMLASAGELQKGNELALPSKYVNFLYLASHYEKLKGSPEDNEQKQLFVEQHKHYLDEIIEQISEFSKRVILADANLDKVLSAYNKHRDKPIREQAENIIHLFTLTNLGAPAAFKYFDTTIDRKRYTSTKEVLDATLIHQSITGLYETRIDLSQLGGDGGAEAAAKEAAAKEAAAKEAAAKALEAEAAAKEAAAKEAAAKEAAAKAGGMDPLQLLQPLEAEIKGTKLKAHWNSGATITCVPEAFLEDERPIQTMLIKTIHGEKQQDVYYLTFKVQGRKVEAEVLASPYDYILLNPSDVPWLMKKPLQLTVLVPLHEYQERLLQQTALPKEQKELLQKLFLKYDALWQHWENQVGHRRIKPHNIATGTLAPRPQKQYPINPKAKPSIQIVIDDLLKQGVLIQQNSTMNTPVYPVPKPDGKWRMVLDYREVNKTIPLIAAQNQHSAGILSSIYRGKYKTTLDLTNGFWAHPITPESYWLTAFTWQGKQYCWTRLPQGFLNSPALFNADVVDLLKEIPNVQAYVDDIYISHDDPQEHLEQLEKIFSILLNAGYVVSLKKSEIAQREVEFLGFNITKEGRGLTDTFKQKLLNITPPKDLKQLQSILGLLNFARNFIPNYSELVKPLYTIVAPANGKFISWTEDNSNQLQHIISVLNQADNLEERNPETRLIIKVNSSPSAGYIRYYNEGSKRPIMYVNYIFSKAEAKFTQTEKLLTTMHKGLIKAMDLAMGQEILVYSPIVSMTKIQRTPLPERKALPVRWITWMTYLEDPRIQFHYDKSLPELQQIPNVTEDVIAKTKHPSEFAMVFYTDGSAIKHPDVNKSHSAGMGIAQVQFIPEYKIVHQWSIPLGDHTAQLAEIAAVEFACKKALKISGPVLIVTDSFYVAESANKELPYWKSNGFLNNKKKPLRHVSKWKSIAECLQLKPDIIIMHEKGHQQPMTTLHTEGNNLADKLATQGSYVVHAGKRTADGSEFEKRTADGSEFESPKKKAKVE

SEQ ID NO: 7666 - protein, 2122 aa, synthetic construct
MPAAKRVKLDGGDKKYSIGLDIGTNSVGWAVITDEYKVPSKKFKVLGNTDRHSIKKNLIGALLFDSGETAEATRLKRTARRRYTRRKNRICYLQEIFSNEMAKVDDSFFHRLEESFLVEEDKKHERHPIFGNIVDEVAYHEKYPTIYHLRKKLVDSTDKADLRLIYLALAHMIKFRGHFLIEGDLNPDNSDVDKLFIQLVQTYNQLFEENPINASGVDAKAILSARLSKSRRLENLIAQLPGEKKNGLFGNLIALSLGLTPNFKSNFDLAEDAKLQLSKDTYDDDLDNLLAQIGDQYADLFLAAKNLSDAILLSDILRVNTEITKAPLSASMIKRYDEHHQDLTLLKALVRQQLPEKYKEIFFDQSKNGYAGYIDGGASQEEFYKFIKPILEKMDGTEELLVKLNREDLLRKQRTFDNGSIPHQIHLGELHAILRRQEDFYPFLKDNREKIEKILTFRIPYYVGPLARGNSRFAWMTRKSEETITPWNFEEVVDKGASAQSFIERMTNFDKNLPNEKVLPKHSLLYEYFTVYNELTKVKYVTEGMRKPAFLSGEQKKAIVDLLFKTNRKVTVKQLKEDYFKKIECFDSVEISGVEDRFNASLGTYHDLLKIIKDKDFLDNEENEDILEDIVLTLTLFEDREMIEERLKTYAHLFDDKVMKQLKRRRYTGWGRLSRKLINGIRDKQSGKTILDFLKSDGFANRNFMQLIHDDSLTFKEDIQKAQVSGQGDSLHEHIANLAGSPAIKKGILQTVKVVDELVKVMGRHKPENIVIEMARENQTTQKGQKNSRERMKRIEEGIKELGSQILKEHPVENTQLQNEKLYLYYLQNGRDMYVDQELDINRLSDYDVDHIVPQSFLKDDSIDNKVLTRSDKARGKSDNVPSEEVVKKMKNYWRQLLNAKLITQRKFDNLTKAERGGLSELDKAGFIKRQLVETRQITKHVAQILDSRMNTKYDENDKLIREVKVITLKSKLVSDFRKDFQFYKVREINNYHHAHDAYLNAVVGTALIKKYPKLESEFVYGDYKVYDVRKMIAKSEQEIGKATAKYFFYSNIMNFFKTEITLANGEIRKRPLIETNGETGEIVWDKGRDFATVRKVLSMPQVNIVKKTEVQTGGFSKESILPKRNSDKLIARKKDWDPKKYGGFDSPTVAYSVLVVAKVEKGKSKKLKSVKELLGITIMERSSFEKNPIDFLEAKGYKEVKKDLIIKLPKYSLFELENGRKRMLASAGELQKGNELALPSKYVNFLYLASHYEKLKGSPEDNEQKQLFVEQHKHYLDEIIEQISEFSKRVILADANLDKVLSAYNKHRDKPIREQAENIIHLFTLTNLGAPAAFKYFDTTIDRKRYTSTKEVLDATLIHQSITGLYETRIDLSQLGGDGGAEAAAKEAAAKEAAAKEAAAKALEAEAAAKEAAAKEAAAKEAAAKAGGIPWLMKKPLQLTTLVPLQEYEERLLKQTMLTGSYKEKLQSLFLKYDALWQHWENQVGHRRIKPHHIATGTVNPRPQKQYPINPKAKASIQTVINDLLKQGVLIQQNSIMNTPVYPVPKPDGKWRMVLDYREVNKTIPLIAAQNQHSAGILSSIFRGKYKTTLDLSNGFWAHSITPESYWLTAFTWLGQQYCWTRLPQGFLNSPALFNADVVDLLKEVPNVQVYVDDIYISHDDPREHLEQLEKVFSLLLNAGYVVSLKKSEIAQHEVEFLGFNITKEGRGLTETFKQKLLNITPPRDLKQLQSILGLLNFARNFIPNFSELVKPLYNIIATAPGKYITWTTDNSQQLQNIISMLNSAENLEERNPEVRLIMKVNTSPSAGYIRFYNEFAKRPIMYLNYVYTKAEVKFTNTEKLLTTIHKGLIKALDLGMGQEILVYSPIVSMTKIQKTPLPERKALPIRWITWMSYLEDPRIQFHYDKTLPELQQVPTVTDDIIAKIKHPSEFSMVFYTDGSAIKHPNVNKSHNAGMGIAQVQFKPEFTVINTWSIPLGDHTAQLAEVAAVEFACKKALKIDGPVLIVTDSFYVAESVNKELPYWQSNGFFNNKKKPLKHVSKWKSIADCIQLKPDIIIIHEKGHQPTASTFHTEGNNLADKLATQGSYVVNAGKRTADGSEFEKRTADGSEFESPKKKAKVE

SEQ ID NO: 7667 - protein, 2122 aa, synthetic construct; identical to SEQ ID NO: 4541

SEQ ID NO: 7668 - protein, 2102 aa, synthetic construct
MPAAKRVKLDGGDKKYSIGLDIGTNSVGWAVITDEYKVPSKKFKVLGNTDRHSIKKNLIGALLFDSGETAEATRLKRTARRRYTRRKNRICYLQEIFSNEMAKVDDSFFHRLEESFLVEEDKKHERHPIFGNIVDEVAYHEKYPTIYHLRKKLVDSTDKADLRLIYLALAHMIKFRGHFLIEGDLNPDNSDVDKLFIQLVQTYNQLFEENPINASGVDAKAILSARLSKSRRLENLIAQLPGEKKNGLFGNLIALSLGLTPNFKSNFDLAEDAKLQLSKDTYDDDLDNLLAQIGDQYADLFLAAKNLSDAILLSDILRVNTEITKAPLSASMIKRYDEHHQDLTLLKALVRQQLPEKYKEIFFDQSKNGYAGYIDGGASQEEFYKFIKPILEKMDGTEELLVKLNREDLLRKQRTFDNGSIPHQIHLGELHAILRRQEDFYPFLKDNREKIEKILTFRIPYYVGPLARGNSRFAWMTRKSEETITPWNFEEVVDKGASAQSFIERMTNFDKNLPNEKVLPKHSLLYEYFTVYNELTKVKYVTEGMRKPAFLSGEQKKAIVDLLFKTNRKVTVKQLKEDYFKKIECFDSVEISGVEDRFNASLGTYHDLLKIIKDKDFLDNEENEDILEDIVLTLTLFEDREMIEERLKTYAHLFDDKVMKQLKRRRYTGWGRLSRKLINGIRDKQSGKTILDFLKSDGFANRNFMQLIHDDSLTFKEDIQKAQVSGQGDSLHEHIANLAGSPAIKKGILQTVKVVDELVKVMGRHKPENIVIEMARENQTTQKGQKNSRERMKRIEEGIKELGSQILKEHPVENTQLQNEKLYLYYLQNGRDMYVDQELDINRLSDYDVDHIVPQSFLKDDSIDNKVLTRSDKARGKSDNVPSEEVVKKMKNYWRQLLNAKLITQRKFDNLTKAERGGLSELDKAGFIKRQLVETRQITKHVAQILDSRMNTKYDENDKLIREVKVITLKSKLVSDFRKDFQFYKVREINNYHHAHDAYLNAVVGTALIKKYPKLESEFVYGDYKVYDVRKMIAKSEQEIGKATAKYFFYSNIMNFFKTEITLANGEIRKRPLIETNGETGEIVWDKGRDFATVRKVLSMPQVNIVKKTEVQTGGFSKESILPKRNSDKLIARKKDWDPKKYGGFDSPTVAYSVLVVAKVEKGKSKKLKSVKELLGITIMERSSFEKNPIDFLEAKGYKEVKKDLIIKLPKYSLFELENGRKRMLASAGELQKGNELALPSKYVNFLYLASHYEKLKGSPEDNEQKQLFVEQHKHYLDEIIEQISEFSKRVILADANLDKVLSAYNKHRDKPIREQAENIIHLFTLTNLGAPAAFKYFDTTIDRKRYTSTKEVLDATLIHQSITGLYETRIDLSQLGGDGGGGGGSEAAAKGGGGSGGTAPLEEEYRLFLEAPIQNVTLLEQWKREIPKVWAEINPPGLASTQAPIHVQLLSTALPVRVRQYPITLEAKRSLRETIRKFRAAGILRPVHSPWNTPLLPVRKSGTSEYRMVQDLREVNKRVETIHPTVPNPYTLLSLLPPDRIWYSVLDLKDAFFCIPLAPESQLIFAFEWADAEEGESGQLTWTRLPQGFKNSPTLFDEALNRDLQGFRLDHPSVSLLQYVDDLLIAADTQAACLSATRDLLMTLAELGYRVSGKKAQLCQEEVTYLGFKIHKGSRSLSNSRTQAILQIPVPKTKRQVREFLGTIGYCRLWIPGFAELAQPLYAATRGGNDPLVWGEKEEEAFQSLKLALTQPPALALPSLDKPFQLFVEETSGAAKGVLTQALGPWKRPVAYLSKRLDPVAAGWPRCLRAIAAAALLTREASKLTFGQDIEITSSHNLESLLRSPPDKWLTNARITQYQVLLLDPPRVRFKQTAALNPATLLPETDDTLPIHHCLDTLDSLTSTRPDLTDQPLAQAEATLFTDGSSYIRDGKRYAGAAVVTLDSVIWAEPLPIGTSAQKAELIALTKALEWSKDKSVNIYTDSRYAFATLHVHGMIYRERGLLTAGGKAIKNAPEILALLTAVWLPKRVAVMHCKGHQKDDAPTSTGNRRADEVAREVAIRPLSTQATISAGKRTADGSEFEKRTADGSEFESPKKKAKVE

SEQ ID NO: 7669 - protein, 2177 aa, synthetic construct
MPAAKRVKLDGGDKKYSIGLDIGTNSVGWAVITDEYKVPSKKFKVLGNTDRHSIKKNLIGALLFDSGETAEATRLKRTARRRYTRRKNRICYLQEIFSNEMAKVDDSFFHRLEESFLVEEDKKHERHPIFGNIVDEVAYHEKYPTIYHLRKKLVDSTDKADLRLIYLALAHMIKFRGHFLIEGDLNPDNSDVDKLFIQLVQTYNQLFEENPINASGVDAKAILSARLSKSRRLENLIAQLPGEKKNGLFGNLIALSLGLTPNFKSNFDLAEDAKLQLSKDTYDDDLDNLLAQIGDQYADLFLAAKNLSDAILLSDILRVNTEITKAPLSASMIKRYDEHHQDLTLLKALVRQQLPEKYKEIFFDQSKNGYAGYIDGGASQEEFYKFIKPILEKMDGTEELLVKLNREDLLRKQRTFDNGSIPHQIHLGELHAILRRQEDFYPFLKDNREKIEKILTFRIPYYVGPLARGNSRFAWMTRKSEETITPWNFEEVVDKGASAQSFIERMTNFDKNLPNEKVLPKHSLLYEYFTVYNELTKVKYVTEGMRKPAFLSGEQKKAIVDLLFKTNRKVTVKQLKEDYFKKIECFDSVEISGVEDRFNASLGTYHDLLKIIKDKDFLDNEENEDILEDIVLTLTLFEDREMIEERLKTYAHLFDDKVMKQLKRRRYTGWGRLSRKLINGIRDKQSGKTILDFLKSDGFANRNFMQLIHDDSLTFKEDIQKAQVSGQGDSLHEHIANLAGSPAIKKGILQTVKVVDELVKVMGRHKPENIVIEMARENQTTQKGQKNSRERMKRIEEGIKELGSQILKEHPVENTQLQNEKLYLYYLQNGRDMYVDQELDINRLSDYDVDHIVPQSFLKDDSIDNKVLTRSDKARGKSDNVPSEEVVKKMKNYWRQLLNAKLITQRKFDNLTKAERGGLSELDKAGFIKRQLVETRQITKHVAQILDSRMNTKYDENDKLIREVKVITLKSKLVSDFRKDFQFYKVREINNYHHAHDAYLNAVVGTALIKKYPKLESEFVYGDYKVYDVRKMIAKSEQEIGKATAKYFFYSNIMNFFKTEITLANGEIRKRPLIETNGETGEIVWDKGRDFATVRKVLSMPQVNIVKKTEVQTGGFSKESILPKRNSDKLIARKKDWDPKKYGGFDSPTVAYSVLVVAKVEKGKSKKLKSVKELLGITIMERSSFEKNPIDFLEAKGYKEVKKDLIIKLPKYSLFELENGRKRMLASAGELQKGNELALPSKYVNFLYLASHYEKLKGSPEDNEQKQLFVEQHKHYLDEIIEQISEFSKRVILADANLDKVLSAYNKHRDKPIREQAENIIHLFTLTNLGAPAAFKYFDTTIDRKRYTSTKEVLDATLIHQSITGLYETRIDLSQLGGDGGGGGGSEAAAKGGGGSGGMDLLKPLTVERKGVKIKGYWNSQADITCVPKDLLQGEEPVRQQNVTTIHGTQEGDVYYVNLKIDGRRINTEVIGTTLDYAIITPGDVPWILKKPLELTIKLDLEEQQGTLLNNSILSKKGKEELKQLFEKYSALWQSWENQVGHRRIRPHKIATGTVKPTPQKQYHINPKAKPDIQIVINDLLKQGVLIQKESTMNTPVYPVPKPNGRWRMVLDYRAVNKVTPLIAVQNQHSYGILGSLFKGRYKTTIDLSNGFWAHPIVPEDYWITAFTWQGKQYCWTVLPQGFLNSPGLFNGDVVDLLQGIPNVEVYVDDVYISHDSEKEHLEYLDILFNRLKEAGYIISLKKSNIANSIVDFLGFQITNEGRGLTDTFKEKLENITAPTTLKQLQSILGLLNFARNFIPDFTELIAPLYALIPKSPKNYVPWQIEHSTTLETLITKLNGAEYLQGRKGDKTLIMKVNASYTTGYIRYYNEGEKKPISYVSIVFSKTELKFTELEKLLTTVHKGLLKALDLSMGQNIHVYSPIVSMQNIQKTPQTAKKALASRWLSWLSYLEDPRIRFFYDPQMPALKDLPAVDTGKDNKKHPSNFQHIFYTDGSAITSPTKEGHLNAGMGIVYFINKDGNLQKQQEWSISLGNHTAQFAEIAAFEFALKKCLPLGGNILVVTDSNYVAKAYNEELDVWASNGFVNNRKKPLKHISKWKSVADLKRLRPDVVVTHEPGHQKLDSSPHAYGNNLADQLATQASFKVHAGKRTADGSEFEKRTADGSEFESPKKKAKVE

SEQ ID NO: 7670 - protein, 2099 aa, synthetic construct
MPAAKRVKLDGGDKKYSIGLDIGTNSVGWAVITDEYKVPSKKFKVLGNTDRHSIKKNLIGALLFDSGETAEATRLKRTARRRYTRRKNRICYLQEIFSNEMAKVDDSFFHRLEESFLVEEDKKHERHPIFGNIVDEVAYHEKYPTIYHLRKKLVDSTDKADLRLIYLALAHMIKFRGHFLIEGDLNPDNSDVDKLFIQLVQTYNQLFEENPINASGVDAKAILSARLSKSRRLENLIAQLPGEKKNGLFGNLIALSLGLTPNFKSNFDLAEDAKLQLSKDTYDDDLDNLLAQIGDQYADLFLAAKNLSDAILLSDILRVNTEITKAPLSASMIKRYDEHHQDLTLLKALVRQQLPEKYKEIFFDQSKNGYAGYIDGGASQEEFYKFIKPILEKMDGTEELLVKLNREDLLRKQRTFDNGSIPHQIHLGELHAILRRQEDFYPFLKDNREKIEKILTFRIPYYVGPLARGNSRFAWMTRKSEETITPWNFEEVVDKGASAQSFIERMTNFDKNLPNEKVLPKHSLLYEYFTVYNELTKVKYVTEGMRKPAFLSGEQKKAIVDLLFKTNRKVTVKQLKEDYFKKIECFDSVEISGVEDRFNASLGTYHDLLKIIKDKDFLDNEENEDILEDIVLTLTLFEDREMIEERLKTYAHLFDDKVMKQLKRRRYTGWGRLSRKLINGIRDKQSGKTILDFLKSDGFANRNFMQLIHDDSLTFKEDIQKAQVSGQGDSLHEHIANLAGSPAIKKGILQTVKVVDELVKVMGRHKPENIVIEMARENQTTQKGQKNSRERMKRIEEGIKELGSQILKEHPVENTQLQNEKLYLYYLQNGRDMYVDQELDINRLSDYDVDHIVPQSFLKDDSIDNKVLTRSDKARGKSDNVPSEEVVKKMKNYWRQLLNAKLITQRKFDNLTKAERGGLSELDKAGFIKRQLVETRQITKHVAQILDSRMNTKYDENDKLIREVKVITLKSKLVSDFRKDFQFYKVREINNYHHAHDAYLNAVVGTALIKKYPKLESEFVYGDYKVYDVRKMIAKSEQEIGKATAKYFFYSNIMNFFKTEITLANGEIRKRPLIETNGETGEIVWDKGRDFATVRKVLSMPQVNIVKKTEVQTGGFSKESILPKRNSDKLIARKKDWDPKKYGGFDSPTVAYSVLVVAKVEKGKSKKLKSVKELLGITIMERSSFEKNPIDFLEAKGYKEVKKDLIIKLPKYSLFELENGRKRMLASAGELQKGNELALPSKYVNFLYLASHYEKLKGSPEDNEQKQLFVEQHKHYLDEIIEQISEFSKRVILADANLDKVLSAYNKHRDKPIREQAENIIHLFTLTNLGAPAAFKYFDTTIDRKRYTSTKEVLDATLIHQSITGLYETRIDLSQLGGDGGGGGGSEAAAKGGGGSGGTLQLEEEYRLFEPESTQKQEMDIWLKNFPQAWAETGGMGTAHCQAPVLIQLKATATPISIRQYPMPHEAYQGIKPHIRRMLDQGILKPCQSPWNTPLLPVKKPGTEDYRPVQDLREVNKRVEDIHPTVPNPYNLLSTLPPSHPWYTVLDLKDAFFCLRLHSESQLLFAFEWRDPEIGLSGQLTWTRLPQGFKNSPTLFNEALHSDLADFRVRYPALVLLQYVDDLLLAAATRTECLEGTKALLETLGNKGYRASAKKAQICLQEVTYLGYSLKDGQRWLTKARKEAILSIPVPKNSRQVREFLGTAGYCRLWIPGFAELAAPLYPLTRPGTLFQWGTEQQLAFEDIKKALLSSPALGLPDITKPFELFIDENSGFAKGVLVQKLGPWKRPVAYLSKKLDTVASGWPPCLRMVAAIAILVKDAGKLTLGQPLTILTSHPVEALVRQPPNKWLSNARMTHYQAMLLDAERVHFGPTVSLNPATLLPLPSGGNHHDCLQILAETHGTRPDLTDQPLPDADLTWYTDGSSFIRNGEREAGAAVTTESEVIWAAPLPPGTSAQRAELIALTQALKMAEGKKLTVYTDSRYAFATTHVHGEIYRRRGWLTSEGKEIKNKNEILALLEALFLPKRLSIIHCPGHQKGDSPQAKGNRLADDTAKKAATETHSSLTVLPAGKRTADGSEFEKRTADGSEFESPKKKAKVE

SEQ ID NO: 7671 - protein, 2180 aa, synthetic construct
MPAAKRVKLDGGDKKYSIGLDIGTNSVGWAVITDEYKVPSKKFKVLGNTDRHSIKKNLIGALLFDSGETAEATRLKRTARRRYTRRKNRICYLQEIFSNEMAKVDDSFFHRLEESFLVEEDKKHERHPIFGNIVDEVAYHEKYPTIYHLRKKLVDSTDKADLRLIYLALAHMIKFRGHFLIEGDLNPDNSDVDKLFIQLVQTYNQLFEENPINASGVDAKAILSARLSKSRRLENLIAQLPGEKKNGLFGNLIALSLGLTPNFKSNFDLAEDAKLQLSKDTYDDDLDNLLAQIGDQYADLFLAAKNLSDAILLSDILRVNTEITKAPLSASMIKRYDEHHQDLTLLKALVRQQLPEKYKEIFFDQSKNGYAGYIDGGASQEEFYKFIKPILEKMDGTEELLVKLNREDLLRKQRTFDNGSIPHQIHLGELHAILRRQEDFYPFLKDNREKIEKILTFRIPYYVGPLARGNSRFAWMTRKSEETITPWNFEEVVDKGASAQSFIERMTNFDKNLPNEKVLPKHSLLYEYFTVYNELTKVKYVTEGMRKPAFLSGEQKKAIVDLLFKTNRKVTVKQLKEDYFKKIECFDSVEISGVEDRFNASLGTYHDLLKIIKDKDFLDNEENEDILEDIVLTLTLFEDREMIEERLKTYAHLFDDKVMKQLKRRRYTGWGRLSRKLINGIRDKQSGKTILDFLKSDGFANRNFMQLIHDDSLTFKEDIQKAQVSGQGDSLHEHIANLAGSPAIKKGILQTVKVVDELVKVMGRHKPENIVIEMARENQTTQKGQKNSRERMKRIEEGIKELGSQILKEHPVENTQLQNEKLYLYYLQNGRDMYVDQELDINRLSDYDVDHIVPQSFLKDDSIDNKVLTRSDKARGKSDNVPSEEVVKKMKNYWRQLLNAKLITQRKFDNLTKAERGGLSELDKAGFIKRQLVETRQITKHVAQILDSRMNTKYDENDKLIREVKVITLKSKLVSDFRKDFQFYKVREINNYHHAHDAYLNAVVGTALIKKYPKLESEFVYGDYKVYDVRKMIAKSEQEIGKATAKYFFYSNIMNFFKTEITLANGEIRKRPLIETNGETGEIVWDKGRDFATVRKVLSMPQVNIVKKTEVQTGGFSKESILPKRNSDKLIARKKDWDPKKYGGFDSPTVAYSVLVVAKVEKGKSKKLKSVKELLGITIMERSSFEKNPIDFLEAKGYKEVKKDLIIKLPKYSLFELENGRKRMLASAGELQKGNELALPSKYVNFLYLASHYEKLKGSPEDNEQKQLFVEQHKHYLDEIIEQISEFSKRVILADANLDKVLSAYNKHRDKPIREQAENIIHLFTLTNLGAPAAFKYFDTTIDRKRYTSTKEVLDATLIHQSITGLYETRIDLSQLGGDGGGGGGSEAAAKGGGGSGGMNPLQLLQPLPAEIKGTKLLAHWNSGATITCIPESFLEDEQPIKKTLIKTIHGEKQQNVYYVTFKVKGRKVEAEVIASPYEYILLSPTDVPWLTQQPLQLTILVPLQEYQEKILSKTALPEDQKQQLKTLFVKYDNLWQHWENQVGHRKIRPHNIATGDYPPRPQKQYPINPKAKPSIQIVIDDLLKQGVLTPQNSTMNTPVYPVPKPDGRWRMVLDYREVNKTIPLTAAQNQHSAGILATIVRQKYKTTLDLANGFWAHPITPESYWLTAFTWQGKQYCWTRLPQGFLNSPALFNADVVDLLKEIPNVQVYVDDIYLSHDDPKEHVQQLEKVFQILLQAGYVVSLKKSEIGQKTVEFLGFNITKEGRGLTDTFKTKLLNITPPKDLKQLQSILGKLNFARNFIPNFAELVQPLYNLIAPAKGKYIEWSEENTKQLNMVIEALNTASNLEERLPEQRLVIKVNTSPSAGYVRYYNETGKKPIMYLNYVFSKAELKFSMLEKLLTTMHKALIKAMDLAMGQEILVYSPIVSMTKIQKTPLPERKALPIRWITWMTYLEDPRIQFHYDKTLPELKHIPDVYTSSQSPVKHPSQYEGVFYTDGSAIKSPDPTKSNNAGMGIVHATYKPEYQVLNQWSIPLGNHTAQMAEIAAVEFACKKALKIPGPVLVITDSFYVAESANKELPYWKSNGFVNNKKKPLKHISKWKSIAECLSMKPDITIQHEKGISLQIPVFILKGNALADKLATQGSYVVNAGKRTADGSEFEKRTADGSEFESPKKKAKVE

SEQ ID NO: 7672 - protein, 2098 aa, synthetic construct
MPAAKRVKLDGGDKKYSIGLDIGTNSVGWAVITDEYKVPSKKFKVLGNTDRHSIKKNLIGALLFDSGETAEATRLKRTARRRYTRRKNRICYLQEIFSNEMAKVDDSFFHRLEESFLVEEDKKHERHPIFGNIVDEVAYHEKYPTIYHLRKKLVDSTDKADLRLIYLALAHMIKFRGHFLIEGDLNPDNSDVDKLFIQLVQTYNQLFEENPINASGVDAKAILSARLSKSRRLENLIAQLPGEKKNGLFGNLIALSLGLTPNFKSNFDLAEDAKLQLSKDTYDDDLDNLLAQIGDQYADLFLAAKNLSDAILLSDILRVNTEITKAPLSASMIKRYDEHHQDLTLLKALVRQQLPEKYKEIFFDQSKNGYAGYIDGGASQEEFYKFIKPILEKMDGTEELLVKLNREDLLRKQRTFDNGSIPHQIHLGELHAILRRQEDFYPFLKDNREKIEKILTFRIPYYVGPLARGNSRFAWMTRKSEETITPWNFEEVVDKGASAQSFIERMTNFDKNLPNEKVLPKHSLLYEYFTVYNELTKVKYVTEGMRKPAFLSGEQKKAIVDLLFKTNRKVTVKQLKEDYFKKIECFDSVEISGVEDRFNASLGTYHDLLKIIKDKDFLDNEENEDILEDIVLTLTLFEDREMIEERLKTYAHLFDDKVMKQLKRRRYTGWGRLSRKLINGIRDKQSGKTILDFLKSDGFANRNFMQLIHDDSLTFKEDIQKAQVSGQGDSLHEHIANLAGSPAIKKGILQTVKVVDELVKVMGRHKPENIVIEMARENQTTQKGQKNSRERMKRIEEGIKELGSQILKEHPVENTQLQNEKLYLYYLQNGRDMYVDQELDINRLSDYDVDHIVPQSFLKDDSIDNKVLTRSDKARGKSDNVPSEEVVKKMKNYWRQLLNAKLITQRKFDNLTKAERGGLSELDKAGFIKRQLVETRQITKHVAQILDSRMNTKYDENDKLIREVKVITLKSKLVSDFRKDFQFYKVREINNYHHAHDAYLNAVVGTALIKKYPKLESEFVYGDYKVYDVRKMIAKSEQEIGKATAKYFFYSNIMNFFKTEITLANGEIRKRPLIETNGETGEIVWDKGRDFATVRKVLSMPQVNIVKKTEVQTGGFSKESILPKRNSDKLIARKKDWDPKKYGGFDSPTVAYSVLVVAKVEKGKSKKLKSVKELLGITIMERSSFEKNPIDFLEAKGYKEVKKDLIIKLPKYSLFELENGRKRMLASAGELQKGNELALPSKYVNFLYLASHYEKLKGSPEDNEQKQLFVEQHKHYLDEIIEQISEFSKRVILADANLDKVLSAYNKHRDKPIREQAENIIHLFTLTNLGAPAAFKYFDTTIDRKRYTSTKEVLDATLIHQSITGLYETRIDLSQLGGDGGGGGGSEAAAKGGGGSGGVLNLEEEYRLHEKPVPSSIDPSWLQLFPTVWAERAGMGLANQVPPVVVELRSGASPVAVRQYPMSKEAREGIRPHIQKFLDLGVLVPCRSPWNTPLLPVKKPGTNDYRPVQDLREINKRVQDIHPTVPNPYNLLSSLPPSYTWYSVLDLKDAFFCLRLHPNSQPLFAFEWKDPEKGNTGQLTWTRLPQGFKNSPTLFNEALHRDLAPFRALNPQVVLLQYVDDLLVAAPTYEDCKKGTQKLLQELSKLGYRVSAKKAQLCQREVTYLGYLLKEGKRWLTPARKATVMKIPVPTTPRQVREFLGKAGFCRLFIPGFASLAAPLYPLTKPSIPFIWTEEHQQAFDHIKKALLSAPALALPDLTKPFTLYIDERAGVARGVLTQTLGPWRRPVAYLSKKLDPVASGWPTCLKAVAAVALLLKDADKLTLGQNVTVIASHSLESIVRQPPDRWMTNARMTHYQSLLLNERVSFAPPAVLNPATLLPVESEATPVHRCSEILAEETGTRRDLEDQPLPGVPTWYTDGSSFITEGKRRAGAPIVDGKRTVWASSLPEGTSAQKAELVALTQALRLAEGKNINIYTDSRYAFATAHIHGAIYKQRGWLTSAGKDIKNKEEILALLEAIHLPRRVAIIHCPGHQRGSNPVATGNRRADEAAKQAALSTRVLAGTTKPAGKRTADGSEFEKRTADGSEFESPKKKAKVE

SEQ ID NO: 7673 - protein, 2017 aa, synthetic construct
MPAAKRVKLDGGDKKYSIGLDIGTNSVGWAVITDEYKVPSKKFKVLGNTDRHSIKKNLIGALLFDSGETAEATRLKRTARRRYTRRKNRICYLQEIFSNEMAKVDDSFFHRLEESFLVEEDKKHERHPIFGNIVDEVAYHEKYPTIYHLRKKLVDSTDKADLRLIYLALAHMIKFRGHFLIEGDLNPDNSDVDKLFIQLVQTYNQLFEENPINASGVDAKAILSARLSKSRRLENLIAQLPGEKKNGLFGNLIALSLGLTPNFKSNFDLAEDAKLQLSKDTYDDDLDNLLAQIGDQYADLFLAAKNLSDAILLSDILRVNTEITKAPLSASMIKRYDEHHQDLTLLKALVRQQLPEKYKEIFFDQSKNGYAGYIDGGASQEEFYKFIKPILEKMDGTEELLVKLNREDLLRKQRTFDNGSIPHQIHLGELHAILRRQEDFYPFLKDNREKIEKILTFRIPYYVGPLARGNSRFAWMTRKSEETITPWNFEEVVDKGASAQSFIERMTNFDKNLPNEKVLPKHSLLYEYFTVYNELTKVKYVTEGMRKPAFLSGEQKKAIVDLLFKTNRKVTVKQLKEDYFKKIECFDSVEISGVEDRFNASLGTYHDLLKIIKDKDFLDNEENEDILEDIVLTLTLFEDREMIEERLKTYAHLFDDKVMKQLKRRRYTGWGRLSRKLINGIRDKQSGKTILDFLKSDGFANRNFMQLIHDDSLTFKEDIQKAQVSGQGDSLHEHIANLAGSPAIKKGILQTVKVVDELVKVMGRHKPENIVIEMARENQTTQKGQKNSRERMKRIEEGIKELGSQILKEHPVENTQLQNEKLYLYYLQNGRDMYVDQELDINRLSDYDVDHIVPQSFLKDDSIDNKVLTRSDKARGKSDNVPSEEVVKKMKNYWRQLLNAKLITQRKFDNLTKAERGGLSELDKAGFIKRQLVETRQITKHVAQILDSRMNTKYDENDKLIREVKVITLKSKLVSDFRKDFQFYKVREINNYHHAHDAYLNAVVGTALIKKYPKLESEFVYGDYKVYDVRKMIAKSEQEIGKATAKYFFYSNIMNFFKTEITLANGEIRKRPLIETNGETGEIVWDKGRDFATVRKVLSMPQVNIVKKTEVQTGGFSKESILPKRNSDKLIARKKDWDPKKYGGFDSPTVAYSVLVVAKVEKGKSKKLKSVKELLGITIMERSSFEKNPIDFLEAKGYKEVKKDLIIKLPKYSLFELENGRKRMLASAGELQKGNELALPSKYVNFLYLASHYEKLKGSPEDNEQKQLFVEQHKHYLDEIIEQISEFSKRVILADANLDKVLSAYNKHRDKPIREQAENIIHLFTLTNLGAPAAFKYFDTTIDRKRYTSTKEVLDATLIHQSITGLYETRIDLSQLGGDGGGGGGSEAAAKGGGGSGGAVLGLEHLPRPPEISQFPLNPERLQALQHLVRKALEAGHIEPYTGPGNNPVFPVKKANGTWRFIHDLRATNSLTIDLSSSSPGPPDLSSLPTTLAHLQTIDLKDAFFQIPLPKQFQPYFAFTVPQQCNYGPGTRYAWRVLPQGFKNSPTLFQMQLAHILQPIRQAFPQCTILQYMDDILLASPSHADLQLLSEATMASLISHGLPVSENKTQQTPGTIKFLGQIISPNHLTYDAVPKVPIRSRWALPELQALLGEIQWVSKGTPTLRQPLHSLYCALQPHTDPRDQIYLNPSQVQSLVQLRQALSQNCRSRLVQTLPLLGAIMLTLTGTTTVVFQSKQQWPLVWLHAPLPHTSQCPWGQLLASAVLLLDKYTLQSYGLLCQTIHHNISTQTFNQFIQTSDHPSVPILLHHSHRFKNLGAQTGELWNTFLKTTAPLAPVKALMPVFTLSPVIINTAPCLFSDGSTSQAAYILWDKHILSQRSFPLPPPHKSAQRAELLGLLHGLSSARSWRCLNIFLDSKYLYHYLRTLALGTFQGRSSQAPFQALLPRLLSRKVVYLHHVRSHTNLPDPISRLNALTDALLITPVLQLAGKRTADGSEFEKRTADGSEFESPKKKAKVE

SEQ ID NO: 7674 - protein, 2100 aa, synthetic construct
MPAAKRVKLDGGDKKYSIGLDIGTNSVGWAVITDEYKVPSKKFKVLGNTDRHSIKKNLIGALLFDSGETAEATRLKRTARRRYTRRKNRICYLQEIFSNEMAKVDDSFFHRLEESFLVEEDKKHERHPIFGNIVDEVAYHEKYPTIYHLRKKLVDSTDKADLRLIYLALAHMIKFRGHFLIEGDLNPDNSDVDKLFIQLVQTYNQLFEENPINASGVDAKAILSARLSKSRRLENLIAQLPGEKKNGLFGNLIALSLGLTPNFKSNFDLAEDAKLQLSKDTYDDDLDNLLAQIGDQYADLFLAAKNLSDAILLSDILRVNTEITKAPLSASMIKRYDEHHQDLTLLKALVRQQLPEKYKEIFFDQSKNGYAGYIDGGASQEEFYKFIKPILEKMDGTEELLVKLNREDLLRKQRTFDNGSIPHQIHLGELHAILRRQEDFYPFLKDNREKIEKILTFRIPYYVGPLARGNSRFAWMTRKSEETITPWNFEEVVDKGASAQSFIERMTNFDKNLPNEKVLPKHSLLYEYFTVYNELTKVKYVTEGMRKPAFLSGEQKKAIVDLLFKTNRKVTVKQLKEDYFKKIECFDSVEISGVEDRFNASLGTYHDLLKIIKDKDFLDNEENEDILEDIVLTLTLFEDREMIEERLKTYAHLFDDKVMKQLKRRRYTGWGRLSRKLINGIRDKQSGKTILDFLKSDGFANRNFMQLIHDDSLTFKEDIQKAQVSGQGDSLHEHIANLAGSPAIKKGILQTVKVVDELVKVMGRHKPENIVIEMARENQTTQKGQKNSRERMKRIEEGIKELGSQILKEHPVENTQLQNEKLYLYYLQNGRDMYVDQELDINRLSDYDVDHIVPQSFLKDDSIDNKVLTRSDKARGKSDNVPSEEVVKKMKNYWRQLLNAKLITQRKFDNLTKAERGGLSELDKAGFIKRQLVETRQITKHVAQILDSRMNTKYDENDKLIREVKVITLKSKLVSDFRKDFQFYKVREINNYHHAHDAYLNAVVGTALIKKYPKLESEFVYGDYKVYDVRKMIAKSEQEIGKATAKYFFYSNIMNFFKTEITLANGEIRKRPLIETNGETGEIVWDKGRDFATVRKVLSMPQVNIVKKTEVQTGGFSKESILPKRNSDKLIARKKDWDPKKYGGFDSPTVAYSVLVVAKVEKGKSKKLKSVKELLGITIMERSSFEKNPIDFLEAKGYKEVKKDLIIKLPKYSLFELENGRKRMLASAGELQKGNELALPSKYVNFLYLASHYEKLKGSPEDNEQKQLFVEQHKHYLDEIIEQISEFSKRVILADANLDKVLSAYNKHRDKPIREQAENIIHLFTLTNLGAPAAFKYFDTTIDRKRYTSTKEVLDATLIHQSITGLYETRIDLSQLGGDGGGGGGSEAAAKGGGGSGGTLNLEDEYRLYETSAEPEVSPGSTWLSDFPQAWAETGGMGLAVRQAPLIIPLKATSTPVSIKQYPMSQEAKLGIKPHIQRLLDQGILVPCQSPWNTPLLPVKKPGTNDYRPVQDLREVNKRVEDIHPTVPNPYNLLSGLPPSHRWYTVLDLKDAFFCLRLHPTSQPLFAFEWRDPGMGISGQLTWTRLPQGFKNSPTLFNEALHRDLADFRIQHPDLILLQYVDDILLAATSELDCQQGTRALLLTLGNLGYRASAKKAQLCQKQVKYLGYLLKEGQRWLTEARKETVMGQPTPKTPRQLREFLGKAGFCRLFIPGFAEMAAPLYPLTKPGTLFNWGPDQQKAYQEIKQALLTAPALGLPDLTKPFELFVDEKQGYAKGVLTQKLGPWRRPVAYLSKKLDPVAAGWPPCLRMVAAIAVLRKDAGKLTMGQPLVILAPHAVEALVKQPPDRWLSNARMTHYQAMLLDTDRVQFGPVVALNPATLLPLPEEGAPHDCLEILAETHGTRPDLTDQPIPDADHTWYTDGSSFLQEGQRKAGAAVTTETEVIWARALPAGTSAQRAELIALTQALKMAEGKRLNVYTDSRYAFATAHIHGEIYRRRGWLTSEGREIKNKSEILALLKALFLPKRLSIIHCLGHQKGDSAEARGNRLADQAAREAAIKTPPDTSTLLAGKRTADGSEFEKRTADGSEFESPKKKAKVE

SEQ ID NO: 7675 - protein, 2100 aa, synthetic construct
MPAAKRVKLDGGDKKYSIGLDIGTNSVGWAVITDEYKVPSKKFKVLGNTDRHSIKKNLIGALLFDSGETAEATRLKRTARRRYTRRKNRICYLQEIFSNEMAKVDDSFFHRLEESFLVEEDKKHERHPIFGNIVDEVAYHEKYPTIYHLRKKLVDSTDKADLRLIYLALAHMIKFRGHFLIEGDLNPDNSDVDKLFIQLVQTYNQLFEENPINASGVDAKAILSARLSKSRRLENLIAQLPGEKKNGLFGNLIALSLGLTPNFKSNFDLAEDAKLQLSKDTYDDDLDNLLAQIGDQYADLFLAAKNLSDAILLSDILRVNTEITKAPLSASMIKRYDEHHQDLTLLKALVRQQLPEKYKEIFFDQSKNGYAGYIDGGASQEEFYKFIKPILEKMDGTEELLVKLNREDLLRKQRTFDNGSIPHQIHLGELHAILRRQEDFYPFLKDNREKIEKILTFRIPYYVGPLARGNSRFAWMTRKSEETITPWNFEEVVDKGASAQSFIERMTNFDKNLPNEKVLPKHSLLYEYFTVYNELTKVKYVTEGMRKPAFLSGEQKKAIVDLLFKTNRKVTVKQLKEDYFKKIECFDSVEISGVEDRFNASLGTYHDLLKIIKDKDFLDNEENEDILEDIVLTLTLFEDREMIEERLKTYAHLFDDKVMKQLKRRRYTGWGRLSRKLINGIRDKQSGKTILDFLKSDGFANRNFMQLIHDDSLTFKEDIQKAQVSGQGDSLHEHIANLAGSPAIKKGILQTVKVVDELVKVMGRHKPENIVIEMARENQTTQKGQKNSRERMKRIEEGIKELGSQILKEHPVENTQLQNEKLYLYYLQNGRDMYVDQELDINRLSDYDVDHIVPQSFLKDDSIDNKVLTRSDKARGKSDNVPSEEVVKKMKNYWRQLLNAKLITQRKFDNLTKAERGGLSELDKAGFIKRQLVETRQITKHVAQILDSRMNTKYDENDKLIREVKVITLKSKLVSDFRKDFQFYKVREINNYHHAHDAYLNAVVGTALIKKYPKLESEFVYGDYKVYDVRKMIAKSEQEIGKATAKYFFYSNIMNFFKTEITLANGEIRKRPLIETNGETGEIVWDKGRDFATVRKVLSMPQVNIVKKTEVQTGGFSKESILPKRNSDKLIARKKDWDPKKYGGFDSPTVAYSVLVVAKVEKGKSKKLKSVKELLGITIMERSSFEKNPIDFLEAKGYKEVKKDLIIKLPKYSLFELENGRKRMLASAGELQKGNELALPSKYVNFLYLASHYEKLKGSPEDNEQKQLFVEQHKHYLDEIIEQISEFSKRVILADANLDKVLSAYNKHRDKPIREQAENIIHLFTLTNLGAPAAFKYFDTTIDRKRYTSTKEVLDATLIHQSITGLYETRIDLSQLGGDGGGGGGSEAAAKGGGGSGGTLGIEDEYRLHETSTEPDVSLGSTWLSDFPQAWAETGGMGLAVRQAPLIIPLKATSTPVSIQQYPMSHEARLGIKPHIQRLLDQGILVPCQSPWNTPLLPVKKPGTNDYRPVQDLREVNKRVEDIHPTVPNPYNLLSGLPPSHQWYTVLDLKDAFFCLRLHPTSQPLFAFEWRDPGMGISGQLTWTRLPQGFKNSPTLFNEALHRDLADFRIQHPDLILLQYVDDILLAATSELDCQQGTRALLQTLGDLGYRASAKKAQICQKQVKYLGYLLREGQRWLTEARKETVMGQPVPKTPRQLREFLGTAGFCRLWIPGFAEMAAPLYPLTKPGTLFSWGPDQQKAYQEIKQALLTAPALGLPDLTKPFELFVDEKQGYAKGVLTQKLGPWRRPVAYLSKKLDPVAAGWPPCLRMVAAIAVLTKDAGKLTMGQPLVILAPHAVEALVKQPPDRWLSNARMTHYQAMLLDTDRVQFGPVVALNPATLLPLPEEGAPHDCLEILAETHGTRPDLTDQPIPDADHTWYTDGSSFLQEGQRKAGAAVTTETEVIWAGALPAGTSAQRAELIALTQALKMAEGKRLNVYTDSRYAFATAHIHGEIYRRRGWLTSEGREIKNKSEILALLKALFLPKRLSIIHCLGHQKGDSAEARGNRLADQAAREAAIKTPPDTSTLLAGKRTADGSEFEKRTADGSEFESPKKKAKVE

SEQ ID NO: 7676 - protein, 2100 aa, synthetic construct
MPAAKRVKLDGGDKKYSIGLDIGTNSVGWAVITDEYKVPSKKFKVLGNTDRHSIKKNLIGALLFDSGETAEATRLKRTARRRYTRRKNRICYLQEIFSNEMAKVDDSFFHRLEESFLVEEDKKHERHPIFGNIVDEVAYHEKYPTIYHLRKKLVDSTDKADLRLIYLALAHMIKFRGHFLIEGDLNPDNSDVDKLFIQLVQTYNQLFEENPINASGVDAKAILSARLSKSRRLENLIAQLPGEKKNGLFGNLIALSLGLTPNFKSNFDLAEDAKLQLSKDTYDDDLDNLLAQIGDQYADLFLAAKNLSDAILLSDILRVNTEITKAPLSASMIKRYDEHHQDLTLLKALVRQQLPEKYKEIFFDQSKNGYAGYIDGGASQEEFYKFIKPILEKMDGTEELLVKLNREDLLRKQRTFDNGSIPHQIHLGELHAILRRQEDFYPFLKDNREKIEKILTFRIPYYVGPLARGNSRFAWMTRKSEETITPWNFEEVVDKGASAQSFIERMTNFDKNLPNEKVLPKHSLLYEYFTVYNELTKVKYVTEGMRKPAFLSGEQKKAIVDLLFKTNRKVTVKQLKEDYFKKIECFDSVEISGVEDRFNASLGTYHDLLKIIKDKDFLDNEENEDILEDIVLTLTLFEDREMIEERLKTYAHLFDDKVMKQLKRRRYTGWGRLSRKLINGIRDKQSGKTILDFLKSDGFANRNFMQLIHDDSLTFKEDIQKAQVSGQGDSLHEHIANLAGSPAIKKGILQTVKVVDELVKVMGRHKPENIVIEMARENQTTQKGQKNSRERMKRIEEGIKELGSQILKEHPVENTQLQNEKLYLYYLQNGRDMYVDQELDINRLSDYDVDHIVPQSFLKDDSIDNKVLTRSDKARGKSDNVPSEEVVKKMKNYWRQLLNAKLITQRKFDNLTKAERGGLSELDKAGFIKRQLVETRQITKHVAQILDSRMNTKYDENDKLIREVKVITLKSKLVSDFRKDFQFYKVREINNYHHAHDAYLNAVVGTALIKKYPKLESEFVYGDYKVYDVRKMIAKSEQEIGKATAKYFFYSNIMNFFKTEITLANGEIRKRPLIETNGETGEIVWDKGRDFATVRKVLSMPQVNIVKKTEVQTGGFSKESILPKRNSDKLIARKKDWDPKKYGGFDSPTVAYSVLVVAKVEKGKSKKLKSVKELLGITIMERSSFEKNPIDFLEAKGYKEVKKDLIIKLPKYSLFELENGRKRMLASAGELQKGNELALPSKYVNFLYLASHYEKLKGSPEDNEQKQLFVEQHKHYLDEIIEQISEFSKRVILADANLDKVLSAYNKHRDKPIREQAENIIHLFTLTNLGAPAAFKYFDTTIDRKRYTSTKEVLDATLIHQSITGLYETRIDLSQLGGDGGGGGGSEAAAKGGGGSGGTLNIEDEYRLHETSKEPDVSLGSTWLSDFPQAWAETGGMGLAVRQAPLIIPLKATSTPVSIKQYPMSQEARLGIKPHIQRLLDQGILVPCQSPWNTPLLPVKKPGTNDYRPVQDLREVNKRVEDIHPTVPNPYNLLSGLPPSHQWYTVLDLKDAFFCLRLHPTSQPLFAFEWRDPEMGISGQLTWTRLPQGFKNSPTLFNEALHRDLAGFRIQHPDLILLQYVDDLLLAATSELDCQQGTRALLQTLGDLGYRASAKKAQICQKQVKYLGYLLKEGQRWLTEARKETVMGQPIPKTPRQLREFLGTAGFCRLWIPGFAEMAAPLYPLTKPGTLFNWGPDQQKAFQEIKQALLTAPALGLPDLTKPFELFVDEKQGYAKGVLTQKLGPWRRPVAYLSKKLDPVAAGWPPCLRMVAAIAVLTKDAGKLTMGQPLVILAPHAVEALVKQPPDRWLSNARMTHYQALLLDTDRVQFGPVVALNPATLLPLPEEGLQHDCLDILAEAHGTRSDLMDQPLPDADHTWYTDGSSFLQEGQRKAGAAVTTETEVIWARALPAGTSAQRAELIALTQALKMAEGKKLNVYTDSRYAFATAHIHGEIYRRRGWLTSEGKEIKNKDEILALLKALFLPKRLSIIHCPGHQKGNSAEARGNRMADQAAREVATRETPETSTLLAGKRTADGSEFEKRTADGSEFESPKKKAKVE

SEQ ID NO: 7677 - protein, 2100 aa, synthetic construct
MPAAKRVKLDGGDKKYSIGLDIGTNSVGWAVITDEYKVPSKKFKVLGNTDRHSIKKNLIGALLFDSGETAEATRLKRTARRRYTRRKNRICYLQEIFSNEMAKVDDSFFHRLEESFLVEEDKKHERHPIFGNIVDEVAYHEKYPTIYHLRKKLVDSTDKADLRLIYLALAHMIKFRGHFLIEGDLNPDNSDVDKLFIQLVQTYNQLFEENPINASGVDAKAILSARLSKSRRLENLIAQLPGEKKNGLFGNLIALSLGLTPNFKSNFDLAEDAKLQLSKDTYDDDLDNLLAQIGDQYADLFLAAKNLSDAILLSDILRVNTEITKAPLSASMIKRYDEHHQDLTLLKALVRQQLPEKYKEIFFDQSKNGYAGYIDGGASQEEFYKFIKPILEKMDGTEELLVKLNREDLLRKQRTFDNGSIPHQIHLGELHAILRRQEDFYPFLKDNREKIEKILTFRIPYYVGPLARGNSRFAWMTRKSEETITPWNFEEVVDKGASAQSFIERMTNFDKNLPNEKVLPKHSLLYEYFTVYNELTKVKYVTEGMRKPAFLSGEQKKAIVDLLFKTNRKVTVKQLKEDYFKKIECFDSVEISGVEDRFNASLGTYHDLLKIIKDKDFLDNEENEDILEDIVLTLTLFEDREMIEERLKTYAHLFDDKVMKQLKRRRYTGWGRLSRKLINGIRDKQSGKTILDFLKSDGFANRNFMQLIHDDSLTFKEDIQKAQVSGQGDSLHEHIANLAGSPAIKKGILQTVKVVDELVKVMGRHKPENIVIEMARENQTTQKGQKNSRERMKRIEEGIKELGSQILKEHPVENTQLQNEKLYLYYLQNGRDMYVDQELDINRLSDYDVDHIVPQSFLKDDSIDNKVLTRSDKARGKSDNVPSEEVVKKMKNYWRQLLNAKLITQRKFDNLTKAERGGLSELDKAGFIKRQLVETRQITKHVAQILDSRMNTKYDENDKLIREVKVITLKSKLVSDFRKDFQFYKVREINNYHHAHDAYLNAVVGTALIKKYPKLESEFVYGDYKVYDVRKMIAKSEQEIGKATAKYFFYSNIMNFFKTEITLANGEIRKRPLIETNGETGEIVWDKGRDFATVRKVLSMPQVNIVKKTEVQTGGFSKESILPKRNSDKLIARKKDWDPKKYGGFDSPTVAYSVLVVAKVEKGKSKKLKSVKELLGITIMERSSFEKNPIDFLEAKGYKEVKKDLIIKLPKYSLFELENGRKRMLASAGELQKGNELALPSKYVNFLYLASHYEKLKGSPEDNEQKQLFVEQHKHYLDEIIEQISEFSKRVILADANLDKVLSAYNKHRDKPIREQAENIIHLFTLTNLGAPAAFKYFDTTIDRKRYTSTKEVLDATLIHQSITGLYETRIDLSQLGGDGGGGGGSEAAAKGGGGSGGTLNIEDEYRLHETSKGPDVPLGSTWLSDFPQAWAETGGMGLAVRQAPLIIPLKATSTPVSIKQYPMSQEARLGIKPHIQRLLDQGILVPCQSPWNTPLLPVKKPGTNDYRPVQDLREVNKRVEDIHPTVPNPYNLLSGLPPSHQWYTVLDLKDAFFCLRLHPTSQSLFAFEWRDPEMGISGQLTWTRLPQGFKNSPTLFNEALHRDLADFRIQHPDLILLQYVDDLLLAATSELDCQQGTRALLQTLGDLGYRASAKKAQICQKQVKYLGYLLKEGQRWLTEARKETVMGQPTPKTPRQLREFLGTAGFCRLWIPGFAEMAAPLYPLTKPGTLFEWGPDQQKAYQEIKQALLTAPALGLPDLTKPFELFVDEKQGYAKGVLTQKLGPWRRPVAYLSKKLDPVAAGWPPCLRMVAAIAVLTKDAGKLTMGQPLVILAPHAVEALVKQPPDRWLSNARMTHYQALLLDTDRVQFGPIVALNPATLLPLPEEGLQHDCLDILAEAHGTRPDLTDQPLPDADHTWYTDGSSFLQEGQRKAGAAVTTETEVVWAKALPAGTSAQRAELIALTQALKMAEGKKLNVYTDSRYAFATAHIHGEIYRRRGWLTSEGKEIKNKDEILALLKALFLPKRLSIIHCPGHQKGNRAEARGNRMADQAAREVATRETPETSTLLAGKRTADGSEFEKRTADGSEFESPKKKAKVE

SEQ ID NO: 7678 - protein, 2120 aa, synthetic construct
MPAAKRVKLDGGDKKYSIGLDIGTNSVGWAVITDEYKVPSKKFKVLGNTDRHSIKKNLIGALLFDSGETAEATRLKRTARRRYTRRKNRICYLQEIFSNEMAKVDDSFFHRLEESFLVEEDKKHERHPIFGNIVDEVAYHEKYPTIYHLRKKLVDSTDKADLRLIYLALAHMIKFRGHFLIEGDLNPDNSDVDKLFIQLVQTYNQLFEENPINASGVDAKAILSARLSKSRRLENLIAQLPGEKKNGLFGNLIALSLGLTPNFKSNFDLAEDAKLQLSKDTYDDDLDNLLAQIGDQYADLFLAAKNLSDAILLSDILRVNTEITKAPLSASMIKRYDEHHQDLTLLKALVRQQLPEKYKEIFFDQSKNGYAGYIDGGASQEEFYKFIKPILEKMDGTEELLVKLNREDLLRKQRTFDNGSIPHQIHLGELHAILRRQEDFYPFLKDNREKIEKILTFRIPYYVGPLARGNSRFAWMTRKSEETITPWNFEEVVDKGASAQSFIERMTNFDKNLPNEKVLPKHSLLYEYFTVYNELTKVKYVTEGMRKPAFLSGEQKKAIVDLLFKTNRKVTVKQLKEDYFKKIECFDSVEISGVEDRFNASLGTYHDLLKIIKDKDFLDNEENEDILEDIVLTLTLFEDREMIEERLKTYAHLFDDKVMKQLKRRRYTGWGRLSRKLINGIRDKQSGKTILDFLKSDGFANRNFMQLIHDDSLTFKEDIQKAQVSGQGDSLHEHIANLAGSPAIKKGILQTVKVVDELVKVMGRHKPENIVIEMARENQTTQKGQKNSRERMKRIEEGIKELGSQILKEHPVENTQLQNEKLYLYYLQNGRDMYVDQELDINRLSDYDVDHIVPQSFLKDDSIDNKVLTRSDKARGKSDNVPSEEVVKKMKNYWRQLLNAKLITQRKFDNLTKAERGGLSELDKAGFIKRQLVETRQITKHVAQILDSRMNTKYDENDKLIREVKVITLKSKLVSDFRKDFQFYKVREINNYHHAHDAYLNAVVGTALIKKYPKLESEFVYGDYKVYDVRKMIAKSEQEIGKATAKYFFYSNIMNFFKTEITLANGEIRKRPLIETNGETGEIVWDKGRDFATVRKVLSMPQVNIVKKTEVQTGGFSKESILPKRNSDKLIARKKDWDPKKYGGFDSPTVAYSVLVVAKVEKGKSKKLKSVKELLGITIMERSSFEKNPIDFLEAKGYKEVKKDLIIKLPKYSLFELENGRKRMLASAGELQKGNELALPSKYVNFLYLASHYEKLKGSPEDNEQKQLFVEQHKHYLDEIIEQISEFSKRVILADANLDKVLSAYNKHRDKPIREQAENIIHLFTLTNLGAPAAFKYFDTTIDRKRYTSTKEVLDATLIHQSITGLYETRIDLSQLGGDGGGGGGSEAAAKGGGGSGGVQEISDSRPMLHIYLNGRRFLGLLDTGADKTCIAGRDWPANWPIHQTESSLQGLGMACGVARSSQPLRWQHEDKSGIIHPFVIPTLPFTLWGRDIMKDIKVRLMTDSPDDSQDLMIGAIESNLFADQISWKSDQPVWLNQWPLKQEKLQALQQLVTEQLQLGHLEESNSPWNTPVFVIKKKSGKWRLLQDLRAVNATMHDMGALQPGLPSPPAVPKGWEIIIIDLQDCFFNIKLHPEDCKRFAFSVPSPNFKRPYQRFQWKVLPQGMKNSPTLCQKFVDKAILTVRDKYQDSYIVHYMDDILLAHPSRSIVDEILTSMIQALNKHGLVVSTEKIQKYDNLKYLGTHIQGDSVSYQKLQIRTDKLRTLNDFQKLLGNINWIRPFLKLTTGELKPLFEILNPDSNPISTRKLTPEACKALQLMNERLSTARVKRLDLSQPWSLCILKTEYTPTACLWQDGVVEWIHLPHISPKVITPYDIFCTQLIIKGRHRSKELFSKDPDYIVVPYTKVQFDLLLQEKEDWPISLLGFLGEVHFHLPKDPLLTFTLQTAIIFPHMTSTTPLEKGIVIFTDGSANGRSVTYIQGREPIIKENTQNTAQQAEIVAVITAFEEVSQPFNLYTDSKYVTGLFPEIETATLSPRTKIYTELKHLQRLIHKRQEKFYIGHIRGHTGLPGPLAQGNAYADSLTRILTAAGKRTADGSEFEKRTADGSEFESPKKKAKVE

SEQ ID NO: 7679 - protein, 2098 aa, synthetic construct
MPAAKRVKLDGGDKKYSIGLDIGTNSVGWAVITDEYKVPSKKFKVLGNTDRHSIKKNLIGALLFDSGETAEATRLKRTARRRYTRRKNRICYLQEIFSNEMAKVDDSFFHRLEESFLVEEDKKHERHPIFGNIVDEVAYHEKYPTIYHLRKKLVDSTDKADLRLIYLALAHMIKFRGHFLIEGDLNPDNSDVDKLFIQLVQTYNQLFEENPINASGVDAKAILSARLSKSRRLENLIAQLPGEKKNGLFGNLIALSLGLTPNFKSNFDLAEDAKLQLSKDTYDDDLDNLLAQIGDQYADLFLAAKNLSDAILLSDILRVNTEITKAPLSASMIKRYDEHHQDLTLLKALVRQQLPEKYKEIFFDQSKNGYAGYIDGGASQEEFYKFIKPILEKMDGTEELLVKLNREDLLRKQRTFDNGSIPHQIHLGELHAILRRQEDFYPFLKDNREKIEKILTFRIPYYVGPLARGNSRFAWMTRKSEETITPWNFEEVVDKGASAQSFIERMTNFDKNLPNEKVLPKHSLLYEYFTVYNELTKVKYVTEGMRKPAFLSGEQKKAIVDLLFKTNRKVTVKQLKEDYFKKIECFDSVEISGVEDRFNASLGTYHDLLKIIKDKDFLDNEENEDILEDIVLTLTLFEDREMIEERLKTYAHLFDDKVMKQLKRRRYTGWGRLSRKLINGIRDKQSGKTILDFLKSDGFANRNFMQLIHDDSLTFKEDIQKAQVSGQGDSLHEHIANLAGSPAIKKGILQTVKVVDELVKVMGRHKPENIVIEMARENQTTQKGQKNSRERMKRIEEGIKELGSQILKEHPVENTQLQNEKLYLYYLQNGRDMYVDQELDINRLSDYDVDHIVPQSFLKDDSIDNKVLTRSDKARGKSDNVPSEEVVKKMKNYWRQLLNAKLITQRKFDNLTKAERGGLSELDKAGFIKRQLVETRQITKHVAQILDSRMNTKYDENDKLIREVKVITLKSKLVSDFRKDFQFYKVREINNYHHAHDAYLNAVVGTALIKKYPKLESEFVYGDYKVYDVRKMIAKSEQEIGKATAKYFFYSNIMNFFKTEITLANGEIRKRPLIETNGETGEIVWDKGRDFATVRKVLSMPQVNIVKKTEVQTGGFSKESILPKRNSDKLIARKKDWDPKKYGGFDSPTVAYSVLVVAKVEKGKSKKLKSVKELLGITIMERSSFEKNPIDFLEAKGYKEVKKDLIIKLPKYSLFELENGRKRMLASAGELQKGNELALPSKYVNFLYLASHYEKLKGSPEDNEQKQLFVEQHKHYLDEIIEQISEFSKRVILADANLDKVLSAYNKHRDKPIREQAENIIHLFTLTNLGAPAAFKYFDTTIDRKRYTSTKEVLDATLIHQSITGLYETRIDLSQLGGDGGGGGGSEAAAKGGGGSGGVLNLEEEYRLHEKPVPSSIDPSWLQLFPTVWAERAGMGLANQVPPVVVELRSGASPVAVRQYPMSKEAREGIRPHIQRFLDLGVLVPCQSPWNTPLLPVKKPGTNDYRPVQDLREINKRVQDIHPTVPNPYNLLSSLPPSHTWYSVLDLKDAFFCLKLHPNSQPLFAFEWRDPEKGNTGQLTWTRLPQGFKNSPTLFNEALHRDLAPFRALNPQVVLLQYVDDLLVAAPTYRDCKEGTQKLLQELSKLGYRVSAKKAQLCQKEVTYLGYLLKEGKRWLTPARKATVMKIPPPTTPRQVREFLGTAGFCRLWIPGFASLAAPLYPLTKPSIPFIWTEEHQKAFDRIKEALLSAPALALPDLTKPFTLYVDERAGVARGVLTQTLGPWRRPVAYLSKKLDPVASGWPTCLKAVAAVALLLKDADKLTLGQNVTVIASHSLESIVRQPPDRWMTNARMTHYQSLLLNERVSFAPPAVLNPATLLPVESEATPVHRCSEILAEETGTRRDLKDQPLPGVPAWYTDGSSFIAEGKRRAGAAIVDGKRTVWASSLPEGTSAQKAELVALTQALRLAEGKDINIYTDSRYAFATAHIHGAIYKQRGWLTSAGKDIKNKEEILALLEAIHLPKRVAIIHCPGHQKGNDPVATGNRRADEAAKQAALSTRVLAETTKPAGKRTADGSEFEKRTADGSEFESPKKKAKVE

SEQ ID NO: 7680 - protein, 2102 aa, synthetic construct
MPAAKRVKLDGGDKKYSIGLDIGTNSVGWAVITDEYKVPSKKFKVLGNTDRHSIKKNLIGALLFDSGETAEATRLKRTARRRYTRRKNRICYLQEIFSNEMAKVDDSFFHRLEESFLVEEDKKHERHPIFGNIVDEVAYHEKYPTIYHLRKKLVDSTDKADLRLIYLALAHMIKFRGHFLIEGDLNPDNSDVDKLFIQLVQTYNQLFEENPINASGVDAKAILSARLSKSRRLENLIAQLPGEKKNGLFGNLIALSLGLTPNFKSNFDLAEDAKLQLSKDTYDDDLDNLLAQIGDQYADLFLAAKNLSDAILLSDILRVNTEITKAPLSASMIKRYDEHHQDLTLLKALVRQQLPEKYKEIFFDQSKNGYAGYIDGGASQEEFYKFIKPILEKMDGTEELLVKLNREDLLRKQRTFDNGSIPHQIHLGELHAILRRQEDFYPFLKDNREKIEKILTFRIPYYVGPLARGNSRFAWMTRKSEETITPWNFEEVVDKGASAQSFIERMTNFDKNLPNEKVLPKHSLLYEYFTVYNELTKVKYVTEGMRKPAFLSGEQKKAIVDLLFKTNRKVTVKQLKEDYFKKIECFDSVEISGVEDRFNASLGTYHDLLKIIKDKDFLDNEENEDILEDIVLTLTLFEDREMIEERLKTYAHLFDDKVMKQLKRRRYTGWGRLSRKLINGIRDKQSGKTILDFLKSDGFANRNFMQLIHDDSLTFKEDIQKAQVSGQGDSLHEHIANLAGSPAIKKGILQTVKVVDELVKVMGRHKPENIVIEMARENQTTQKGQKNSRERMKRIEEGIKELGSQILKEHPVENTQLQNEKLYLYYLQNGRDMYVDQELDINRLSDYDVDHIVPQSFLKDDSIDNKVLTRSDKARGKSDNVPSEEVVKKMKNYWRQLLNAKLITQRKFDNLTKAERGGLSELDKAGFIKRQLVETRQITKHVAQILDSRMNTKYDENDKLIREVKVITLKSKLVSDFRKDFQFYKVREINNYHHAHDAYLNAVVGTALIKKYPKLESEFVYGDYKVYDVRKMIAKSEQEIGKATAKYFFYSNIMNFFKTEITLANGEIRKRPLIETNGETGEIVWDKGRDFATVRKVLSMPQVNIVKKTEVQTGGFSKESILPKRNSDKLIARKKDWDPKKYGGFDSPTVAYSVLVVAKVEKGKSKKLKSVKELLGITIMERSSFEKNPIDFLEAKGYKEVKKDLIIKLPKYSLFELENGRKRMLASAGELQKGNELALPSKYVNFLYLASHYEKLKGSPEDNEQKQLFVEQHKHYLDEIIEQISEFSKRVILADANLDKVLSAYNKHRDKPIREQAENIIHLFTLTNLGAPAAFKYFDTTIDRKRYTSTKEVLDATLIHQSITGLYETRIDLSQLGGDGGEAAAKGGGGSEAAAKGGTAPLEEEYRLFLEAPIQNVTLLEQWKREIPKVWAEINPPGLASTQAPIHVQLLSTALPVRVRQYPITLEAKRSLRETIRKFRAAGILRPVHSPWNTPLLPVRKSGTSEYRMVQDLREVNKRVETIHPTVPNPYTLLSLLPPDRIWYSVLDLKDAFFCIPLAPESQLIFAFEWADAEEGESGQLTWTRLPQGFKNSPTLFDEALNRDLQGFRLDHPSVSLLQYVDDLLIAADTQAACLSATRDLLMTLAELGYRVSGKKAQLCQEEVTYLGFKIHKGSRSLSNSRTQAILQIPVPKTKRQVREFLGTIGYCRLWIPGFAELAQPLYAATRGGNDPLVWGEKEEEAFQSLKLALTQPPALALPSLDKPFQLFVEETSGAAKGVLTQALGPWKRPVAYLSKRLDPVAAGWPRCLRAIAAAALLTREASKLTFGQDIEITSSHNLESLLRSPPDKWLTNARITQYQVLLLDPPRVRFKQTAALNPATLLPETDDTLPIHHCLDTLDSLTSTRPDLTDQPLAQAEATLFTDGSSYIRDGKRYAGAAVVTLDSVIWAEPLPIGTSAQKAELIALTKALEWSKDKSVNIYTDSRYAFATLHVHGMIYRERGLLTAGGKAIKNAPEILALLTAVWLPKRVAVMHCKGHQKDDAPTSTGNRRADEVAREVAIRPLSTQATISAGKRTADGSEFEKRTADGSEFESPKKKAKVE

SEQ ID NO: 7681 - protein, 2098 aa, synthetic construct
MPAAKRVKLDGGDKKYSIGLDIGTNSVGWAVITDEYKVPSKKFKVLGNTDRHSIKKNLIGALLFDSGETAEATRLKRTARRRYTRRKNRICYLQEIFSNEMAKVDDSFFHRLEESFLVEEDKKHERHPIFGNIVDEVAYHEKYPTIYHLRKKLVDSTDKADLRLIYLALAHMIKFRGHFLIEGDLNPDNSDVDKLFIQLVQTYNQLFEENPINASGVDAKAILSARLSKSRRLENLIAQLPGEKKNGLFGNLIALSLGLTPNFKSNFDLAEDAKLQLSKDTYDDDLDNLLAQIGDQYADLFLAAKNLSDAILLSDILRVNTEITKAPLSASMIKRYDEHHQDLTLLKALVRQQLPEKYKEIFFDQSKNGYAGYIDGGASQEEFYKFIKPILEKMDGTEELLVKLNREDLLRKQRTFDNGSIPHQIHLGELHAILRRQEDFYPFLKDNREKIEKILTFRIPYYVGPLARGNSRFAWMTRKSEETITPWNFEEVVDKGASAQSFIERMTNFDKNLPNEKVLPKHSLLYEYFTVYNELTKVKYVTEGMRKPAFLSGEQKKAIVDLLFKTNRKVTVKQLKEDYFKKIECFDSVEISGVEDRFNASLGTYHDLLKIIKDKDFLDNEENEDILEDIVLTLTLFEDREMIEERLKTYAHLFDDKVMKQLKRRRYTGWGRLSRKLINGIRDKQSGKTILDFLKSDGFANRNFMQLIHDDSLTFKEDIQKAQVSGQGDSLHEHIANLAGSPAIKKGILQTVKVVDELVKVMGRHKPENIVIEMARENQTTQKGQKNSRERMKRIEEGIKELGSQILKEHPVENTQLQNEKLYLYYLQNGRDMYVDQELDINRLSDYDVDHIVPQSFLKDDSIDNKVLTRSDKARGKSDNVPSEEVVKKMKNYWRQLLNAKLITQRKFDNLTKAERGGLSELDKAGFIKRQLVETRQITKHVAQILDSRMNTKYDENDKLIREVKVITLKSKLVSDFRKDFQFYKVREINNYHHAHDAYLNAVVGTALIKKYPKLESEFVYGDYKVYDVRKMIAKSEQEIGKATAKYFFYSNIMNFFKTEITLANGEIRKRPLIETNGETGEIVWDKGRDFATVRKVLSMPQVNIVKKTEVQTGGFSKESILPKRNSDKLIARKKDWDPKKYGGFDSPTVAYSVLVVAKVEKGKSKKLKSVKELLGITIMERSSFEKNPIDFLEAKGYKEVKKDLIIKLPKYSLFELENGRKRMLASAGELQKGNELALPSKYVNFLYLASHYEKLKGSPEDNEQKQLFVEQHKHYLDEIIEQISEFSKRVILADANLDKVLSAYNKHRDKPIREQAENIIHLFTLTNLGAPAAFKYFDTTIDRKRYTSTKEVLDATLIHQSITGLYETRIDLSQLGGDGGEAAAKGGGGSEAAAKGGVLNLEEEYRLHEKPVPSSIDPSWLQLFPTVWAERAGMGLANQVPPVVVELRSGASPVAVRQYPMSKEAREGIRPHIQKFLDLGVLVPCRSPWNTPLLPVKKPGTNDYRPVQDLREINKRVQDIHPTVPNPYNLLSSLPPSYTWYSVLDLKDAFFCLRLHPNSQPLFAFEWKDPEKGNTGQLTWTRLPQGFKNSPTLFNEALHRDLAPFRALNPQVVLLQYVDDLLVAAPTYEDCKKGTQKLLQELSKLGYRVSAKKAQLCQREVTYLGYLLKEGKRWLTPARKATVMKIPVPTTPRQVREFLGTAGFCRLWIPGFASLAAPLYPLTKPSIPFIWTEEHQQAFDHIKKALLSAPALALPDLTKPFTLYIDERAGVARGVLTQTLGPWRRPVAYLSKKLDPVASGWPTCLKAVAAVALLLKDADKLTLGQNVTVIASHSLESIVRQPPDRWMTNARMTHYQSLLLNERVSFAPPAVLNPATLLPVESEATPVHRCSEILAEETGTRRDLEDQPLPGVPTWYTDGSSFITEGKRRAGAPIVDGKRTVWASSLPEGTSAQKAELVALTQALRLAEGKNINIYTDSRYAFATAHIHGAIYKQRGWLTSAGKDIKNKEEILALLEAIHLPRRVAIIHCPGHQRGSNPVATGNRRADEAAKQAALSTRVLAGTTKPAGKRTADGSEFEKRTADGSEFESPKKKAKVE

SEQ ID NO: 7682 - protein, 2222 aa, synthetic construct
MPAAKRVKLDGGDKKYSIGLDIGTNSVGWAVITDEYKVPSKKFKVLGNTDRHSIKKNLIGALLFDSGETAEATRLKRTARRRYTRRKNRICYLQEIFSNEMAKVDDSFFHRLEESFLVEEDKKHERHPIFGNIVDEVAYHEKYPTIYHLRKKLVDSTDKADLRLIYLALAHMIKFRGHFLIEGDLNPDNSDVDKLFIQLVQTYNQLFEENPINASGVDAKAILSARLSKSRRLENLIAQLPGEKKNGLFGNLIALSLGLTPNFKSNFDLAEDAKLQLSKDTYDDDLDNLLAQIGDQYADLFLAAKNLSDAILLSDILRVNTEITKAPLSASMIKRYDEHHQDLTLLKALVRQQLPEKYKEIFFDQSKNGYAGYIDGGASQEEFYKFIKPILEKMDGTEELLVKLNREDLLRKQRTFDNGSIPHQIHLGELHAILRRQEDFYPFLKDNREKIEKILTFRIPYYVGPLARGNSRFAWMTRKSEETITPWNFEEVVDKGASAQSFIERMTNFDKNLPNEKVLPKHSLLYEYFTVYNELTKVKYVTEGMRKPAFLSGEQKKAIVDLLFKTNRKVTVKQLKEDYFKKIECFDSVEISGVEDRFNASLGTYHDLLKIIKDKDFLDNEENEDILEDIVLTLTLFEDREMIEERLKTYAHLFDDKVMKQLKRRRYTGWGRLSRKLINGIRDKQSGKTILDFLKSDGFANRNFMQLIHDDSLTFKEDIQKAQVSGQGDSLHEHIANLAGSPAIKKGILQTVKVVDELVKVMGRHKPENIVIEMARENQTTQKGQKNSRERMKRIEEGIKELGSQILKEHPVENTQLQNEKLYLYYLQNGRDMYVDQELDINRLSDYDVDHIVPQSFLKDDSIDNKVLTRSDKARGKSDNVPSEEVVKKMKNYWRQLLNAKLITQRKFDNLTKAERGGLSELDKAGFIKRQLVETRQITKHVAQILDSRMNTKYDENDKLIREVKVITLKSKLVSDFRKDFQFYKVREINNYHHAHDAYLNAVVGTALIKKYPKLESEFVYGDYKVYDVRKMIAKSEQEIGKATAKYFFYSNIMNFFKTEITLANGEIRKRPLIETNGETGEIVWDKGRDFATVRKVLSMPQVNIVKKTEVQTGGFSKESILPKRNSDKLIARKKDWDPKKYGGFDSPTVAYSVLVVAKVEKGKSKKLKSVKELLGITIMERSSFEKNPIDFLEAKGYKEVKKDLIIKLPKYSLFELENGRKRMLASAGELQKGNELALPSKYVNFLYLASHYEKLKGSPEDNEQKQLFVEQHKHYLDEIIEQISEFSKRVILADANLDKVLSAYNKHRDKPIREQAENIIHLFTLTNLGAPAAFKYFDTTIDRKRYTSTKEVLDATLIHQSITGLYETRIDLSQLGGDGGEAAAKGGGGSEAAAKGGTLGDQGSRGSDPLPEPRVTLTVEGIPTEFLVNTGAEHSVLTKPMGKMGSKRTVVAGATGSKVYPWTTKRLLKIGQKQVTHSFLVIPECPAPLLGRDLLTKLKAQIQFSTEGPQVTWEDRPAMCLVLNLEEEYRLHEKPVPPSIDPSWLQLFPMVWAEKAGMGLANQVPPVVVELKSDASPVAVRQYPMSKEAREGIRPHIQRFLDLGILVPCQSPWNTPLLPVKKPGTNDYRPVQDLREVNKRVQDIHPTVPNPYNLLSSLPPSHTWYSVLDLKDAFFCLKLHPNSQPLFAFEWRDPEKGNTGQLTWTRLPQGFKNSPTLFNEALHRDLASFRALNPQVVMLQYVDDLLVAAPTYRDCKEGTRRLLQELSKLGYRVSAKKAQLCREEVTYLGYLLKGGKRWLTPARKATVMKIPTPTTPRQVREFLGTAGFCRLWIPGFASLAAPLYPLTRPKVPFTWTEAHQEAFGRIKEALLSAPALALPDLTKPFALYVDEKEGVARGVLTQTLGPWRRPVAYLSKKLDPVASGWPTCLKAIAAVALLLKDADKLTLGQNVLVIAPHNLESIVRQPPDRWMTNARMTHYQSLLLNERVSFAPPAILNPATLLPVESDDTPIHICSEILAEETGTRPDLRDQPLPGVPAWYTDGSSFIMDGRRQAGAAIVDNKRTVWASNLPEGTSAQKAELIALTQALRLAEGKSINIYTDSRYAFATAHVHGAIYKQRGWLTSAGKDIKNKEEILALLEAIHLPKRVAIIHCPGHQRGTDPVATGNRKADEAAKQAAQSTRILTETTKNAGKRTADGSEFEKRTADGSEFESPKKKAKVE

SEQ ID NO: 7683 - protein, 2100 aa, synthetic construct
MPAAKRVKLDGGDKKYSIGLDIGTNSVGWAVITDEYKVPSKKFKVLGNTDRHSIKKNLIGALLFDSGETAEATRLKRTARRRYTRRKNRICYLQEIFSNEMAKVDDSFFHRLEESFLVEEDKKHERHPIFGNIVDEVAYHEKYPTIYHLRKKLVDSTDKADLRLIYLALAHMIKFRGHFLIEGDLNPDNSDVDKLFIQLVQTYNQLFEENPINASGVDAKAILSARLSKSRRLENLIAQLPGEKKNGLFGNLIALSLGLTPNFKSNFDLAEDAKLQLSKDTYDDDLDNLLAQIGDQYADLFLAAKNLSDAILLSDILRVNTEITKAPLSASMIKRYDEHHQDLTLLKALVRQQLPEKYKEIFFDQSKNGYAGYIDGGASQEEFYKFIKPILEKMDGTEELLVKLNREDLLRKQRTFDNGSIPHQIHLGELHAILRRQEDFYPFLKDNREKIEKILTFRIPYYVGPLARGNSRFAWMTRKSEETITPWNFEEVVDKGASAQSFIERMTNFDKNLPNEKVLPKHSLLYEYFTVYNELTKVKYVTEGMRKPAFLSGEQKKAIVDLLFKTNRKVTVKQLKEDYFKKIECFDSVEISGVEDRFNASLGTYHDLLKIIKDKDFLDNEENEDILEDIVLTLTLFEDREMIEERLKTYAHLFDDKVMKQLKRRRYTGWGRLSRKLINGIRDKQSGKTILDFLKSDGFANRNFMQLIHDDSLTFKEDIQKAQVSGQGDSLHEHIANLAGSPAIKKGILQTVKVVDELVKVMGRHKPENIVIEMARENQTTQKGQKNSRERMKRIEEGIKELGSQILKEHPVENTQLQNEKLYLYYLQNGRDMYVDQELDINRLSDYDVDHIVPQSFLKDDSIDNKVLTRSDKARGKSDNVPSEEVVKKMKNYWRQLLNAKLITQRKFDNLTKAERGGLSELDKAGFIKRQLVETRQITKHVAQILDSRMNTKYDENDKLIREVKVITLKSKLVSDFRKDFQFYKVREINNYHHAHDAYLNAVVGTALIKKYPKLESEFVYGDYKVYDVRKMIAKSEQEIGKATAKYFFYSNIMNFFKTEITLANGEIRKRPLIETNGETGEIVWDKGRDFATVRKVLSMPQVNIVKKTEVQTGGFSKESILPKRNSDKLIARKKDWDPKKYGGFDSPTVAYSVLVVAKVEKGKSKKLKSVKELLGITIMERSSFEKNPIDFLEAKGYKEVKKDLIIKLPKYSLFELENGRKRMLASAGELQKGNELALPSKYVNFLYLASHYEKLKGSPEDNEQKQLFVEQHKHYLDEIIEQISEFSKRVILADANLDKVLSAYNKHRDKPIREQAENIIHLFTLTNLGAPAAFKYFDTTIDRKRYTSTKEVLDATLIHQSITGLYETRIDLSQLGGDGGEAAAKGGGGSEAAAKGGTLNLEDEYRLYETSAEPEVSPGSTWLSDFPQAWAETGGMGLAVRQAPLIIPLKATSTPVSIKQYPMSQEAKLGIKPHIQRLLDQGILVPCQSPWNTPLLPVKKPGTNDYRPVQDLREVNKRVEDIHPTVPNPYNLLSGLPPSHRWYTVLDLKDAFFCLRLHPTSQPLFAFEWRDPGMGISGQLTWTRLPQGFKNSPTLFNEALHRDLADFRIQHPDLILLQYVDDILLAATSELDCQQGTRALLLTLGNLGYRASAKKAQLCQKQVKYLGYLLKEGQRWLTEARKETVMGQPTPKTPRQLREFLGTAGFCRLWIPGFAEMAAPLYPLTKPGTLFNWGPDQQKAYQEIKQALLTAPALGLPDLTKPFELFVDEKQGYAKGVLTQKLGPWRRPVAYLSKKLDPVAAGWPPCLRMVAAIAVLRKDAGKLTMGQPLVILAPHAVEALVKQPPDRWLSNARMTHYQAMLLDTDRVQFGPVVALNPATLLPLPEEGAPHDCLEILAETHGTRPDLTDQPIPDADHTWYTDGSSFLQEGQRKAGAAVTTETEVIWARALPAGTSAQRAELIALTQALKMAEGKRLNVYTDSRYAFATAHIHGEIYRRRGWLTSEGREIKNKSEILALLKALFLPKRLSIIHCLGHQKGDSAEARGNRLADQAAREAAIKTPPDTSTLLAGKRTADGSEFEKRTADGSEFESPKKKAKVE

SEQ ID NO: 7684 - protein, 2100 aa, synthetic construct
MPAAKRVKLDGGDKKYSIGLDIGTNSVGWAVITDEYKVPSKKFKVLGNTDRHSIKKNLIGALLFDSGETAEATRLKRTARRRYTRRKNRICYLQEIFSNEMAKVDDSFFHRLEESFLVEEDKKHERHPIFGNIVDEVAYHEKYPTIYHLRKKLVDSTDKADLRLIYLALAHMIKFRGHFLIEGDLNPDNSDVDKLFIQLVQTYNQLFEENPINASGVDAKAILSARLSKSRRLENLIAQLPGEKKNGLFGNLIALSLGLTPNFKSNFDLAEDAKLQLSKDTYDDDLDNLLAQIGDQYADLFLAAKNLSDAILLSDILRVNTEITKAPLSASMIKRYDEHHQDLTLLKALVRQQLPEKYKEIFFDQSKNGYAGYIDGGASQEEFYKFIKPILEKMDGTEELLVKLNREDLLRKQRTFDNGSIPHQIHLGELHAILRRQEDFYPFLKDNREKIEKILTFRIPYYVGPLARGNSRFAWMTRKSEETITPWNFEEVVDKGASAQSFIERMTNFDKNLPNEKVLPKHSLLYEYFTVYNELTKVKYVTEGMRKPAFLSGEQKKAIVDLLFKTNRKVTVKQLKEDYFKKIECFDSVEISGVEDRFNASLGTYHDLLKIIKDKDFLDNEENEDILEDIVLTLTLFEDREMIEERLKTYAHLFDDKVMKQLKRRRYTGWGRLSRKLINGIRDKQSGKTILDFLKSDGFANRNFMQLIHDDSLTFKEDIQKAQVSGQGDSLHEHIANLAGSPAIKKGILQTVKVVDELVKVMGRHKPENIVIEMARENQTTQKGQKNSRERMKRIEEGIKELGSQILKEHPVENTQLQNEKLYLYYLQNGRDMYVDQELDINRLSDYDVDHIVPQSFLKDDSIDNKVLTRSDKARGKSDNVPSEEVVKKMKNYWRQLLNAKLITQRKFDNLTKAERGGLSELDKAGFIKRQLVETRQITKHVAQILDSRMNTKYDENDKLIREVKVITLKSKLVSDFRKDFQFYKVREINNYHHAHDAYLNAVVGTALIKKYPKLESEFVYGDYKVYDVRKMIAKSEQEIGKATAKYFFYSNIMNFFKTEITLANGEIRKRPLIETNGETGEIVWDKGRDFATVRKVLSMPQVNIVKKTEVQTGGFSKESILPKRNSDKLIARKKDWDPKKYGGFDSPTVAYSVLVVAKVEKGKSKKLKSVKELLGITIMERSSFEKNPIDFLEAKGYKEVKKDLIIKLPKYSLFELENGRKRMLASAGELQKGNELALPSKYVNFLYLASHYEKLKGSPEDNEQKQLFVEQHKHYLDEIIEQISEFSKRVILADANLDKVLSAYNKHRDKPIREQAENIIHLFTLTNLGAPAAFKYFDTTIDRKRYTSTKEVLDATLIHQSITGLYETRIDLSQLGGDGGEAAAKGGGGSEAAAKGGTLGIEDEYRLHETSTEPDVSLGSTWLSDFPQAWAETGGMGLAVRQAPLIIPLKATSTPVSIQQYPMSHEARLGIKPHIQRLLDQGILVPCQSPWNTPLLPVKKPGTNDYRPVQDLREVNKRVEDIHPTVPNPYNLLSGLPPSHQWYTVLDLKDAFFCLRLHPTSQPLFAFEWRDPGMGISGQLTWTRLPQGFKNSPTLFNEALHRDLADFRIQHPDLILLQYVDDILLAATSELDCQQGTRALLQTLGDLGYRASAKKAQICQKQVKYLGYLLREGQRWLTEARKETVMGQPVPKTPRQLREFLGTAGFCRLWIPGFAEMAAPLYPLTKPGTLFSWGPDQQKAYQEIKQALLTAPALGLPDLTKPFELFVDEKQGYAKGVLTQKLGPWRRPVAYLSKKLDPVAAGWPPCLRMVAAIAVLTKDAGKLTMGQPLVILAPHAVEALVKQPPDRWLSNARMTHYQAMLLDTDRVQFGPVVALNPATLLPLPEEGAPHDCLEILAETHGTRPDLTDQPIPDADHTWYTDGSSFLQEGQRKAGAAVTTETEVIWAGALPAGTSAQRAELIALTQALKMAEGKRLNVYTDSRYAFATAHIHGEIYRRRGWLTSEGREIKNKSEILALLKALFLPKRLSIIHCLGHQKGDSAEARGNRLADQAAREAAIKTPPDTSTLLAGKRTADGSEFEKRTADGSEFESPKKKAKVE

SEQ ID NO: 7685 - protein, 2100 aa, synthetic construct
MPAAKRVKLDGGDKKYSIGLDIGTNSVGWAVITDEYKVPSKKFKVLGNTDRHSIKKNLIGALLFDSGETAEATRLKRTARRRYTRRKNRICYLQEIFSNEMAKVDDSFFHRLEESFLVEEDKKHERHPIFGNIVDEVAYHEKYPTIYHLRKKLVDSTDKADLRLIYLALAHMIKFRGHFLIEGDLNPDNSDVDKLFIQLVQTYNQLFEENPINASGVDAKAILSARLSKSRRLENLIAQLPGEKKNGLFGNLIALSLGLTPNFKSNFDLAEDAKLQLSKDTYDDDLDNLLAQIGDQYADLFLAAKNLSDAILLSDILRVNTEITKAPLSASMIKRYDEHHQDLTLLKALVRQQLPEKYKEIFFDQSKNGYAGYIDGGASQEEFYKFIKPILEKMDGTEELLVKLNREDLLRKQRTFDNGSIPHQIHLGELHAILRRQEDFYPFLKDNREKIEKILTFRIPYYVGPLARGNSRFAWMTRKSEETITPWNFEEVVDKGASAQSFIERMTNFDKNLPNEKVLPKHSLLYEYFTVYNELTKVKYVTEGMRKPAFLSGEQKKAIVDLLFKTNRKVTVKQLKEDYFKKIECFDSVEISGVEDRFNASLGTYHDLLKIIKDKDFLDNEENEDILEDIVLTLTLFEDREMIEERLKTYAHLFDDKVMKQLKRRRYTGWGRLSRKLINGIRDKQSGKTILDFLKSDGFANRNFMQLIHDDSLTFKEDIQKAQVSGQGDSLHEHIANLAGSPAIKKGILQTVKVVDELVKVMGRHKPENIVIEMARENQTTQKGQKNSRERMKRIEEGIKELGSQILKEHPVENTQLQNEKLYLYYLQNGRDMYVDQELDINRLSDYDVDHIVPQSFLKDDSIDNKVLTRSDKARGKSDNVPSEEVVKKMKNYWRQLLNAKLITQRKFDNLTKAERGGLSELDKAGFIKRQLVETRQITKHVAQILDSRMNTKYDENDKLIREVKVITLKSKLVSDFRKDFQFYKVREINNYHHAHDAYLNAVVGTALIKKYPKLESEFVYGDYKVYDVRKMIAKSEQEIGKATAKYFFYSNIMNFFKTEITLANGEIRKRPLIETNGETGEIVWDKGRDFATVRKVLSMPQVNIVKKTEVQTGGFSKESILPKRNSDKLIARKKDWDPKKYGGFDSPTVAYSVLVVAKVEKGKSKKLKSVKELLGITIMERSSFEKNPIDFLEAKGYKEVKKDLIIKLPKYSLFELENGRKRMLASAGELQKGNELALPSKYVNFLYLASHYEKLKGSPEDNEQKQLFVEQHKHYLDEIIEQISEFSKRVILADANLDKVLSAYNKHRDKPIREQAENIIHLFTLTNLGAPAAFKYFDTTIDRKRYTSTKEVLDATLIHQSITGLYETRIDLSQLGGDGGEAAAKGGGGSEAAAKGGTLNIEDEYRLHETSKGPDVPLGSTWLSDFPQAWAETGGMGLAVRQAPLIIPLKATSTPVSIKQYPMSQEARLGIKPHIQRLLDQGILVPCQSPWNTPLLPVKKPGTNDYRPVQDLREVNKRVEDIHPTVPNPYNLLSGLPPSHQWYTVLDLKDAFFCLRLHPTSQSLFAFEWRDPEMGISGQLTWTRLPQGFKNSPTLFNEALHRDLADFRIQHPDLILLQYVDDLLLAATSELDCQQGTRALLQTLGDLGYRASAKKAQICQKQVKYLGYLLKEGQRWLTEARKETVMGQPTPKTPRQLREFLGTAGFCRLWIPGFAEMAAPLYPLTKPGTLFEWGPDQQKAYQEIKQALLTAPALGLPDLTKPFELFVDEKQGYAKGVLTQKLGPWRRPVAYLSKKLDPVAAGWPPCLRMVAAIAVLTKDAGKLTMGQPLVILAPHAVEALVKQPPDRWLSNARMTHYQALLLDTDRVQFGPIVALNPATLLPLPEEGLQHDCLDILAEAHGTRPDLTDQPLPDADHTWYTDGSSFLQEGQRKAGAAVTTETEVVWAKALPAGTSAQRAELIALTQALKMAEGKKLNVYTDSRYAFATAHIHGEIYRRRGWLTSEGKEIKNKDEILALLKALFLPKRLSIIHCPGHQKGNRAEARGNRMADQAAREVATRETPETSTLLAGKRTADGSEFEKRTADGSEFESPKKKAKVE

SEQ ID NO: 7686 - protein, 2100 aa, synthetic construct
MPAAKRVKLDGGDKKYSIGLDIGTNSVGWAVITDEYKVPSKKFKVLGNTDRHSIKKNLIGALLFDSGETAEATRLKRTARRRYTRRKNRICYLQEIFSNEMAKVDDSFFHRLEESFLVEEDKKHERHPIFGNIVDEVAYHEKYPTIYHLRKKLVDSTDKADLRLIYLALAHMIKFRGHFLIEGDLNPDNSDVDKLFIQLVQTYNQLFEENPINASGVDAKAILSARLSKSRRLENLIAQLPGEKKNGLFGNLIALSLGLTPNFKSNFDLAEDAKLQLSKDTYDDDLDNLLAQIGDQYADLFLAAKNLSDAILLSDILRVNTEITKAPLSASMIKRYDEHHQDLTLLKALVRQQLPEKYKEIFFDQSKNGYAGYIDGGASQEEFYKFIKPILEKMDGTEELLVKLNREDLLRKQRTFDNGSIPHQIHLGELHAILRRQEDFYPFLKDNREKIEKILTFRIPYYVGPLARGNSRFAWMTRKSEETITPWNFEEVVDKGASAQSFIERMTNFDKNLPNEKVLPKHSLLYEYFTVYNELTKVKYVTEGMRKPAFLSGEQKKAIVDLLFKTNRKVTVKQLKEDYFKKIECFDSVEISGVEDRFNASLGTYHDLLKIIKDKDFLDNEENEDILEDIVLTLTLFEDREMIEERLKTYAHLFDDKVMKQLKRRRYTGWGRLSRKLINGIRDKQSGKTILDFLKSDGFANRNFMQLIHDDSLTFKEDIQKAQVSGQGDSLHEHIANLAGSPAIKKGILQTVKVVDELVKVMGRHKPENIVIEMARENQTTQKGQKNSRERMKRIEEGIKELGSQILKEHPVENTQLQNEKLYLYYLQNGRDMYVDQELDINRLSDYDVDHIVPQSFLKDDSIDNKVLTRSDKARGKSDNVPSEEVVKKMKNYWRQLLNAKLITQRKFDNLTKAERGGLSELDKAGFIKRQLVETRQITKHVAQILDSRMNTKYDENDKLIREVKVITLKSKLVSDFRKDFQFYKVREINNYHHAHDAYLNAVVGTALIKKYPKLESEFVYGDYKVYDVRKMIAKSEQEIGKATAKYFFYSNIMNFFKTEITLANGEIRKRPLIETNGETGEIVWDKGRDFATVRKVLSMPQVNIVKKTEVQTGGFSKESILPKRNSDKLIARKKDWDPKKYGGFDSPTVAYSVLVVAKVEKGKSKKLKSVKELLGITIMERSSFEKNPIDFLEAKGYKEVKKDLIIKLPKYSLFELENGRKRMLASAGELQKGNELALPSKYVNFLYLASHYEKLKGSPEDNEQKQLFVEQHKHYLDEIIEQISEFSKRVILADANLDKVLSAYNKHRDKPIREQAENIIHLFTLTNLGAPAAFKYFDTTIDRKRYTSTKEVLDATLIHQSITGLYETRIDLSQLGGDGGEAAAKGGGGSEAAAKGGTLNIEDEYRLHEISTEPDVSPGSTWLSDFPQAWAETGGMGLAVRQAPLIIPLKATSTPVSIKQYPMSQEAKLGIKPHIQRLLDQGILVPCQSPWNTPLLPVKKPGTNDYRPVQGLREVNKRVEDIHPTVPNPYNLLSGLPTSHRWYTVLDLKDAFFCLRLHPTSQPLFASEWRDPGMGISGQLTWTRLPQGFKNSPTLFNEALHRGLADFRIQHPDLILLQYVDDLLLAATSELDCQQGTRALLKTLGNLGYRASAKKAQICQKQVKYLGYLLREGQRWLTEARKETVMGQPTPKTPRQLREFLGKAGFCRLFIPRFAEMAAPLYPLTKPGTLFNWGPDQQKAYHEIKQALLTAPALGLPDLTKPFELFVDEKQGYAKGVLTQKLGPWRRPVAYLSKKLDPVAAGWPPCLRMVAAIAVLTKDAGKLTMGQPLVILAPHAVEALVKQPPDRWLSNARMTHYQAMLLDTDRVQFGPVVALNPATLLPLPEEGAPHDCLEILAETHGTEPDLTDQPIPDADHTWYTDGSSFLQEGQRKAGAAVTTETEVIWARALPAGTSAQRAELIALTQALKMAEGKRLNVYTDSRYAFATAHIHGEIYKRRGWLTSEGREIKNKSEILALLKALFLPKRLSIIHCLGHQKGDSAEARGNRLADQAAREAAIKTPPDTSTLLAGKRTADGSEFEKRTADGSEFESPKKKAKVE

SEQ ID NO: 7687 - protein, 2098 aa, synthetic construct
MPAAKRVKLDGGDKKYSIGLDIGTNSVGWAVITDEYKVPSKKFKVLGNTDRHSIKKNLIGALLFDSGETAEATRLKRTARRRYTRRKNRICYLQEIFSNEMAKVDDSFFHRLEESFLVEEDKKHERHPIFGNIVDEVAYHEKYPTIYHLRKKLVDSTDKADLRLIYLALAHMIKFRGHFLIEGDLNPDNSDVDKLFIQLVQTYNQLFEENPINASGVDAKAILSARLSKSRRLENLIAQLPGEKKNGLFGNLIALSLGLTPNFKSNFDLAEDAKLQLSKDTYDDDLDNLLAQIGDQYADLFLAAKNLSDAILLSDILRVNTEITKAPLSASMIKRYDEHHQDLTLLKALVRQQLPEKYKEIFFDQSKNGYAGYIDGGASQEEFYKFIKPILEKMDGTEELLVKLNREDLLRKQRTFDNGSIPHQIHLGELHAILRRQEDFYPFLKDNREKIEKILTFRIPYYVGPLARGNSRFAWMTRKSEETITPWNFEEVVDKGASAQSFIERMTNFDKNLPNEKVLPKHSLLYEYFTVYNELTKVKYVTEGMRKPAFLSGEQKKAIVDLLFKTNRKVTVKQLKEDYFKKIECFDSVEISGVEDRFNASLGTYHDLLKIIKDKDFLDNEENEDILEDIVLTLTLFEDREMIEERLKTYAHLFDDKVMKQLKRRRYTGWGRLSRKLINGIRDKQSGKTILDFLKSDGFANRNFMQLIHDDSLTFKEDIQKAQVSGQGDSLHEHIANLAGSPAIKKGILQTVKVVDELVKVMGRHKPENIVIEMARENQTTQKGQKNSRERMKRIEEGIKELGSQILKEHPVENTQLQNEKLYLYYLQNGRDMYVDQELDINRLSDYDVDHIVPQSFLKDDSIDNKVLTRSDKARGKSDNVPSEEVVKKMKNYWRQLLNAKLITQRKFDNLTKAERGGLSELDKAGFIKRQLVETRQITKHVAQILDSRMNTKYDENDKLIREVKVITLKSKLVSDFRKDFQFYKVREINNYHHAHDAYLNAVVGTALIKKYPKLESEFVYGDYKVYDVRKMIAKSEQEIGKATAKYFFYSNIMNFFKTEITLANGEIRKRPLIETNGETGEIVWDKGRDFATVRKVLSMPQVNIVKKTEVQTGGFSKESILPKRNSDKLIARKKDWDPKKYGGFDSPTVAYSVLVVAKVEKGKSKKLKSVKELLGITIMERSSFEKNPIDFLEAKGYKEVKKDLIIKLPKYSLFELENGRKRMLASAGELQKGNELALPSKYVNFLYLASHYEKLKGSPEDNEQKQLFVEQHKHYLDEIIEQISEFSKRVILADANLDKVLSAYNKHRDKPIREQAENIIHLFTLTNLGAPAAFKYFDTTIDRKRYTSTKEVLDATLIHQSITGLYETRIDLSQLGGDGGEAAAKGGGGSEAAAKGGVLNLEEEYRLHEKPVPSSIDPSWLQLFPTVWAERAGMGLANQVPPVVVELRSGASPVAVRQYPMSKEAREGIRPHIQRFLDLGVLVPCQSPWNTPLLPVKKPGTNDYRPVQDLREINKRVQDIHPTVPNPYNLLSSLPPSHTWYSVLDLKDAFFCLKLHPNSQPLFAFEWRDPEKGNTGQLTWTRLPQGFKNSPTLFNEALHRDLAPFRALNPQVVLLQYVDDLLVAAPTYRDCKEGTQKLLQELSKLGYRVSAKKAQLCQKEVTYLGYLLKEGKRWLTPARKATVMKIPPPTTPRQVREFLGTAGFCRLWIPGFASLAAPLYPLTKPSIPFIWTEEHQKAFDRIKEALLSAPALALPDLTKPFTLYVDERAGVARGVLTQTLGPWRRPVAYLSKKLDPVASGWPTCLKAVAAVALLLKDADKLTLGQNVTVIASHSLESIVRQPPDRWMTNARMTHYQSLLLNERVSFAPPAVLNPATLLPVESEATPVHRCSEILAEETGTRRDLKDQPLPGVPAWYTDGSSFIAEGKRRAGAAIVDGKRTVWASSLPEGTSAQKAELVALTQALRLAEGKDINIYTDSRYAFATAHIHGAIYKQRGWLTSAGKDIKNKEEILALLEAIHLPKRVAIIHCPGHQKGNDPVATGNRRADEAAKQAALSTRVLAETTKPAGKRTADGSEFEKRTADGSEFESPKKKAKVE

SEQ ID NO: 7688 - protein, 2100 aa, synthetic construct
MPAAKRVKLDGGDKKYSIGLDIGTNSVGWAVITDEYKVPSKKFKVLGNTDRHSIKKNLIGALLFDSGETAEATRLKRTARRRYTRRKNRICYLQEIFSNEMAKVDDSFFHRLEESFLVEEDKKHERHPIFGNIVDEVAYHEKYPTIYHLRKKLVDSTDKADLRLIYLALAHMIKFRGHFLIEGDLNPDNSDVDKLFIQLVQTYNQLFEENPINASGVDAKAILSARLSKSRRLENLIAQLPGEKKNGLFGNLIALSLGLTPNFKSNFDLAEDAKLQLSKDTYDDDLDNLLAQIGDQYADLFLAAKNLSDAILLSDILRVNTEITKAPLSASMIKRYDEHHQDLTLLKALVRQQLPEKYKEIFFDQSKNGYAGYIDGGASQEEFYKFIKPILEKMDGTEELLVKLNREDLLRKQRTFDNGSIPHQIHLGELHAILRRQEDFYPFLKDNREKIEKILTFRIPYYVGPLARGNSRFAWMTRKSEETITPWNFEEVVDKGASAQSFIERMTNFDKNLPNEKVLPKHSLLYEYFTVYNELTKVKYVTEGMRKPAFLSGEQKKAIVDLLFKTNRKVTVKQLKEDYFKKIECFDSVEISGVEDRFNASLGTYHDLLKIIKDKDFLDNEENEDILEDIVLTLTLFEDREMIEERLKTYAHLFDDKVMKQLKRRRYTGWGRLSRKLINGIRDKQSGKTILDFLKSDGFANRNFMQLIHDDSLTFKEDIQKAQVSGQGDSLHEHIANLAGSPAIKKGILQTVKVVDELVKVMGRHKPENIVIEMARENQTTQKGQKNSRERMKRIEEGIKELGSQILKEHPVENTQLQNEKLYLYYLQNGRDMYVDQELDINRLSDYDVDHIVPQSFLKDDSIDNKVLTRSDKARGKSDNVPSEEVVKKMKNYWRQLLNAKLITQRKFDNLTKAERGGLSELDKAGFIKRQLVETRQITKHVAQILDSRMNTKYDENDKLIREVKVITLKSKLVSDFRKDFQFYKVREINNYHHAHDAYLNAVVGTALIKKYPKLESEFVYGDYKVYDVRKMIAKSEQEIGKATAKYFFYSNIMNFFKTEITLANGEIRKRPLIETNGETGEIVWDKGRDFATVRKVLSMPQVNIVKKTEVQTGGFSKESILPKRNSDKLIARKKDWDPKKYGGFDSPTVAYSVLVVAKVEKGKSKKLKSVKELLGITIMERSSFEKNPIDFLEAKGYKEVKKDLIIKLPKYSLFELENGRKRMLASAGELQKGNELALPSKYVNFLYLASHYEKLKGSPEDNEQKQLFVEQHKHYLDEIIEQISEFSKRVILADANLDKVLSAYNKHRDKPIREQAENIIHLFTLTNLGAPAAFKYFDTTIDRKRYTSTKEVLDATLIHQSITGLYETRIDLSQLGGDGGEAAAKGGGGSEAAAKGGTLNIEDEYRLHETSKEPDVPLGSTWLSDFPQAWAETGGMGLAVRQAPLIIPLKATSTPVSIKQYPMSQEARLGIKPHIQRLLDQGILVPCQSPWNTPLLPVKKPGTNDYRPVQDLREVNKRVEDIHPTVPNPYNLLSGLPPSHQWYTVLDLKDAFFCLRLHPTSQPLFAFEWRDPEMGISGQLTWTRLPQGFKNSPTLFDEALHRDLADFRIQHPDLILLQYVDDLLLAATSEQDCQRGTRALLQTLGNLGYRASAKKAQICQKQVKYLGYLLKEGQRWLTEARKETVMGQPTPKTPRQLREFLGTAGFCRLWIPGFAEMAAPLYPLTKTGTLFNWGPDQQKAYQEIKQALLTAPALGLPDLTKPFELFVDEKQGYAKGVLTQKLGPWRRPVAYLSKKLDPVAAGWPPCLRMVAAIAVLTKDAGKLTMGQPLVILAPHAVEALVKQPPDRWLSNARMTHYQAMLLDTDRVQFGPVVALNPATLLPLPEKEAPHDCLEILAETHGTRPDLTDQPIPDADYTWYTDGSSFLQEGQRRAGAAVTTETEVIWARALPAGTSAQRAELIALTQALKMAEGKKLNVYTDSRYAFATAHVHGEIYRRRGLLTSEGREIKNKNEILALLKALFLPKRLSIIHCPGHQKGNSAEARGNRMADQAAREAAMKAVLETSTLLAGKRTADGSEFEKRTADGSEFESPKKKAKVE

SEQ ID NO: 7689 - protein, 2103 aa, synthetic construct
MPAAKRVKLDGGDKKYSIGLDIGTNSVGWAVITDEYKVPSKKFKVLGNTDRHSIKKNLIGALLFDSGETAEATRLKRTARRRYTRRKNRICYLQEIFSNEMAKVDDSFFHRLEESFLVEEDKKHERHPIFGNIVDEVAYHEKYPTIYHLRKKLVDSTDKADLRLIYLALAHMIKFRGHFLIEGDLNPDNSDVDKLFIQLVQTYNQLFEENPINASGVDAKAILSARLSKSRRLENLIAQLPGEKKNGLFGNLIALSLGLTPNFKSNFDLAEDAKLQLSKDTYDDDLDNLLAQIGDQYADLFLAAKNLSDAILLSDILRVNTEITKAPLSASMIKRYDEHHQDLTLLKALVRQQLPEKYKEIFFDQSKNGYAGYIDGGASQEEFYKFIKPILEKMDGTEELLVKLNREDLLRKQRTFDNGSIPHQIHLGELHAILRRQEDFYPFLKDNREKIEKILTFRIPYYVGPLARGNSRFAWMTRKSEETITPWNFEEVVDKGASAQSFIERMTNFDKNLPNEKVLPKHSLLYEYFTVYNELTKVKYVTEGMRKPAFLSGEQKKAIVDLLFKTNRKVTVKQLKEDYFKKIECFDSVEISGVEDRFNASLGTYHDLLKIIKDKDFLDNEENEDILEDIVLTLTLFEDREMIEERLKTYAHLFDDKVMKQLKRRRYTGWGRLSRKLINGIRDKQSGKTILDFLKSDGFANRNFMQLIHDDSLTFKEDIQKAQVSGQGDSLHEHIANLAGSPAIKKGILQTVKVVDELVKVMGRHKPENIVIEMARENQTTQKGQKNSRERMKRIEEGIKELGSQILKEHPVENTQLQNEKLYLYYLQNGRDMYVDQELDINRLSDYDVDHIVPQSFLKDDSIDNKVLTRSDKARGKSDNVPSEEVVKKMKNYWRQLLNAKLITQRKFDNLTKAERGGLSELDKAGFIKRQLVETRQITKHVAQILDSRMNTKYDENDKLIREVKVITLKSKLVSDFRKDFQFYKVREINNYHHAHDAYLNAVVGTALIKKYPKLESEFVYGDYKVYDVRKMIAKSEQEIGKATAKYFFYSNIMNFFKTEITLANGEIRKRPLIETNGETGEIVWDKGRDFATVRKVLSMPQVNIVKKTEVQTGGFSKESILPKRNSDKLIARKKDWDPKKYGGFDSPTVAYSVLVVAKVEKGKSKKLKSVKELLGITIMERSSFEKNPIDFLEAKGYKEVKKDLIIKLPKYSLFELENGRKRMLASAGELQKGNELALPSKYVNFLYLASHYEKLKGSPEDNEQKQLFVEQHKHYLDEIIEQISEFSKRVILADANLDKVLSAYNKHRDKPIREQAENIIHLFTLTNLGAPAAFKYFDTTIDRKRYTSTKEVLDATLIHQSITGLYETRIDLSQLGGDGGSGSETPGTSESATPESGGTAPLEEEYRLFLEAPIQNVTLLEQWKREIPKVWAEINPPGLASTQAPIHVQLLSTALPVRVRQYPITLEAKRSLRETIRKFRAAGILRPVHSPWNTPLLPVRKSGTSEYRMVQDLREVNKRVETIHPTVPNPYTLLSLLPPDRIWYSVLDLKDAFFCIPLAPESQLIFAFEWADAEEGESGQLTWTRLPQGFKNSPTLFNEALNRDLQGFRLDHPSVSLLQYVDDLLIAADTQAACLSATRDLLMTLAELGYRVSGKKAQLCQEEVTYLGFKIHKGSRSLSNSRTQAILQIPVPKTKRQVREFLGTIGYCRLWIPGFAELAQPLYAATRPGNDPLVWGEKEEEAFQSLKLALTQPPALALPSLDKPFQLFVEETSGAAKGVLTQALGPWKRPVAYLSKRLDPVAAGWPRCLRAIAAAALLTREASKLTFGQDIEITSSHNLESLLRSPPDKWLTNARITQYQVLLLDPPRVRFKQTAALNPATLLPETDDTLPIHHCLDTLDSLTSTRPDLTDQPLAQAEATLFTDGSSYIRDGKRYAGAAVVTLDSVIWAEPLPIGTSAQKAELIALTKALEWSKDKSVNIYTDSRYAFATLHVHGMIYRERGWLTAGGKAIKNAPEILALLTAVWLPKRVAVMHCKGHQKDDAPTSTGNRRADEVAREVAIRPLSTQATISAGKRTADGSEFEKRTADGSEFESPKKKAKVE

SEQ ID NO: 7690 - protein, 2178 aa, synthetic construct
MPAAKRVKLDGGDKKYSIGLDIGTNSVGWAVITDEYKVPSKKFKVLGNTDRHSIKKNLIGALLFDSGETAEATRLKRTARRRYTRRKNRICYLQEIFSNEMAKVDDSFFHRLEESFLVEEDKKHERHPIFGNIVDEVAYHEKYPTIYHLRKKLVDSTDKADLRLIYLALAHMIKFRGHFLIEGDLNPDNSDVDKLFIQLVQTYNQLFEENPINASGVDAKAILSARLSKSRRLENLIAQLPGEKKNGLFGNLIALSLGLTPNFKSNFDLAEDAKLQLSKDTYDDDLDNLLAQIGDQYADLFLAAKNLSDAILLSDILRVNTEITKAPLSASMIKRYDEHHQDLTLLKALVRQQLPEKYKEIFFDQSKNGYAGYIDGGASQEEFYKFIKPILEKMDGTEELLVKLNREDLLRKQRTFDNGSIPHQIHLGELHAILRRQEDFYPFLKDNREKIEKILTFRIPYYVGPLARGNSRFAWMTRKSEETITPWNFEEVVDKGASAQSFIERMTNFDKNLPNEKVLPKHSLLYEYFTVYNELTKVKYVTEGMRKPAFLSGEQKKAIVDLLFKTNRKVTVKQLKEDYFKKIECFDSVEISGVEDRFNASLGTYHDLLKIIKDKDFLDNEENEDILEDIVLTLTLFEDREMIEERLKTYAHLFDDKVMKQLKRRRYTGWGRLSRKLINGIRDKQSGKTILDFLKSDGFANRNFMQLIHDDSLTFKEDIQKAQVSGQGDSLHEHIANLAGSPAIKKGILQTVKVVDELVKVMGRHKPENIVIEMARENQTTQKGQKNSRERMKRIEEGIKELGSQILKEHPVENTQLQNEKLYLYYLQNGRDMYVDQELDINRLSDYDVDHIVPQSFLKDDSIDNKVLTRSDKARGKSDNVPSEEVVKKMKNYWRQLLNAKLITQRKFDNLTKAERGGLSELDKAGFIKRQLVETRQITKHVAQILDSRMNTKYDENDKLIREVKVITLKSKLVSDFRKDFQFYKVREINNYHHAHDAYLNAVVGTALIKKYPKLESEFVYGDYKVYDVRKMIAKSEQEIGKATAKYFFYSNIMNFFKTEITLANGEIRKRPLIETNGETGEIVWDKGRDFATVRKVLSMPQVNIVKKTEVQTGGFSKESILPKRNSDKLIARKKDWDPKKYGGFDSPTVAYSVLVVAKVEKGKSKKLKSVKELLGITIMERSSFEKNPIDFLEAKGYKEVKKDLIIKLPKYSLFELENGRKRMLASAGELQKGNELALPSKYVNFLYLASHYEKLKGSPEDNEQKQLFVEQHKHYLDEIIEQISEFSKRVILADANLDKVLSAYNKHRDKPIREQAENIIHLFTLTNLGAPAAFKYFDTTIDRKRYTSTKEVLDATLIHQSITGLYETRIDLSQLGGDGGSGSETPGTSESATPESGGMDLLKPLTVERKGVKIKGYWNSQADITCVPKDLLQGEEPVRQQNVTTIHGTQEGDVYYVNLKIDGRRINTEVIGTTLDYAIITPGDVPWILKKPLELTIKLDLEEQQGTLLNNSILSKKGKEELKQLFEKYSALWQSWENQVGHRRIRPHKIATGTVKPTPQKQYHINPKAKPDIQIVINDLLKQGVLIQKESTMNTPVYPVPKPNGRWRMVLDYRAVNKVTPLIAVQNQHSYGILGSLFKGRYKTTIDLSNGFWAHPIVPEDYWITAFTWQGKQYCWTVLPQGFLNSPGLFTGDVVDLLQGIPNVEVYVDDVYISHDSEKEHLEYLDILFNRLKEAGYIISLKKSNIANSIVDFLGFQITNEGRGLTDTFKEKLENITAPTTLKQLQSILGLLNFARNFIPDFTELIAPLYALIPKSTKNYVPWQIEHSTTLETLITKLNGAEYLQGRKGDKTLIMKVNASYTTGYIRYYNEGEKKPISYVSIVFSKTELKFTELEKLLTTVHKGLLKALDLSMGQNIHVYSPIVSMQNIQKTPQTAKKALASRWLSWLSYLEDPRIRFFYDPQMPALKDLPAVDTGKDNKKHPSNFQHIFYTDGSAITSPTKEGHLNAGMGIVYFINKDGNLQKQQEWSISLGNHTAQFAEIAAFEFALKKCLPLGGNILVVTDSNYVAKAYNEELDVWASNGFVNNRKKPLKHISKWKSVADLKRLRPDVVVTHEPGHQKLDSSPHAYGNNLADQLATQASFKVHAGKRTADGSEFEKRTADGSEFESPKKKAKVE

SEQ ID NO: 7691 - protein, 2100 aa, synthetic construct
MPAAKRVKLDGGDKKYSIGLDIGTNSVGWAVITDEYKVPSKKFKVLGNTDRHSIKKNLIGALLFDSGETAEATRLKRTARRRYTRRKNRICYLQEIFSNEMAKVDDSFFHRLEESFLVEEDKKHERHPIFGNIVDEVAYHEKYPTIYHLRKKLVDSTDKADLRLIYLALAHMIKFRGHFLIEGDLNPDNSDVDKLFIQLVQTYNQLFEENPINASGVDAKAILSARLSKSRRLENLIAQLPGEKKNGLFGNLIALSLGLTPNFKSNFDLAEDAKLQLSKDTYDDDLDNLLAQIGDQYADLFLAAKNLSDAILLSDILRVNTEITKAPLSASMIKRYDEHHQDLTLLKALVRQQLPEKYKEIFFDQSKNGYAGYIDGGASQEEFYKFIKPILEKMDGTEELLVKLNREDLLRKQRTFDNGSIPHQIHLGELHAILRRQEDFYPFLKDNREKIEKILTFRIPYYVGPLARGNSRFAWMTRKSEETITPWNFEEVVDKGASAQSFIERMTNFDKNLPNEKVLPKHSLLYEYFTVYNELTKVKYVTEGMRKPAFLSGEQKKAIVDLLFKTNRKVTVKQLKEDYFKKIECFDSVEISGVEDRFNASLGTYHDLLKIIKDKDFLDNEENEDILEDIVLTLTLFEDREMIEERLKTYAHLFDDKVMKQLKRRRYTGWGRLSRKLINGIRDKQSGKTILDFLKSDGFANRNFMQLIHDDSLTFKEDIQKAQVSGQGDSLHEHIANLAGSPAIKKGILQTVKVVDELVKVMGRHKPENIVIEMARENQTTQKGQKNSRERMKRIEEGIKELGSQILKEHPVENTQLQNEKLYLYYLQNGRDMYVDQELDINRLSDYDVDHIVPQSFLKDDSIDNKVLTRSDKARGKSDNVPSEEVVKKMKNYWRQLLNAKLITQRKFDNLTKAERGGLSELDKAGFIKRQLVETRQITKHVAQILDSRMNTKYDENDKLIREVKVITLKSKLVSDFRKDFQFYKVREINNYHHAHDAYLNAVVGTALIKKYPKLESEFVYGDYKVYDVRKMIAKSEQEIGKATAKYFFYSNIMNFFKTEITLANGEIRKRPLIETNGETGEIVWDKGRDFATVRKVLSMPQVNIVKKTEVQTGGFSKESILPKRNSDKLIARKKDWDPKKYGGFDSPTVAYSVLVVAKVEKGKSKKLKSVKELLGITIMERSSFEKNPIDFLEAKGYKEVKKDLIIKLPKYSLFELENGRKRMLASAGELQKGNELALPSKYVNFLYLASHYEKLKGSPEDNEQKQLFVEQHKHYLDEIIEQISEFSKRVILADANLDKVLSAYNKHRDKPIREQAENIIHLFTLTNLGAPAAFKYFDTTIDRKRYTSTKEVLDATLIHQSITGLYETRIDLSQLGGDGGSGSETPGTSESATPESGGTLQLEEEYRLFEPESTQKQEMDIWLKNFPQAWAETGGMGTAHCQAPVLIQLKATATPISIRQYPMPHEAYQGIKPHIRRMLDQGILKPCQSPWNTPLLPVKKPGTEDYRPVQDLREVNKRVEDIHPTVPNPYNLLSTLPPSHPWYTVLDLKDAFFCLRLHSESQLLFAFEWRDPEIGLSGQLTWTRLPQGFKNSPTLFNEALHSDLADFRVRYPALVLLQYVDDLLLAAATRTECLEGTKALLETLGNKGYRASAKKAQICLQEVTYLGYSLKDGQRWLTKARKEAILSIPVPKNSRQVREFLGTAGYCRLWIPGFAELAAPLYPLTRPGTLFQWGTEQQLAFEDIKKALLSSPALGLPDITKPFELFIDENSGFAKGVLVQKLGPWKRPVAYLSKKLDTVASGWPPCLRMVAAIAILVKDAGKLTLGQPLTILTSHPVEALVRQPPNKWLSNARMTHYQAMLLDAERVHFGPTVSLNPATLLPLPSGGNHHDCLQILAETHGTRPDLTDQPLPDADLTWYTDGSSFIRNGEREAGAAVTTESEVIWAAPLPPGTSAQRAELIALTQALKMAEGKKLTVYTDSRYAFATTHVHGEIYRRRGWLTSEGKEIKNKNEILALLEALFLPKRLSIIHCPGHQKGDSPQAKGNRLADDTAKKAATETHSSLTVLPAGKRTADGSEFEKRTADGSEFESPKKKAKVE

SEQ ID NO: 7692 - protein, 2011 aa, synthetic construct
MPAAKRVKLDGGDKKYSIGLDIGTNSVGWAVITDEYKVPSKKFKVLGNTDRHSIKKNLIGALLFDSGETAEATRLKRTARRRYTRRKNRICYLQEIFSNEMAKVDDSFFHRLEESFLVEEDKKHERHPIFGNIVDEVAYHEKYPTIYHLRKKLVDSTDKADLRLIYLALAHMIKFRGHFLIEGDLNPDNSDVDKLFIQLVQTYNQLFEENPINASGVDAKAILSARLSKSRRLENLIAQLPGEKKNGLFGNLIALSLGLTPNFKSNFDLAEDAKLQLSKDTYDDDLDNLLAQIGDQYADLFLAAKNLSDAILLSDILRVNTEITKAPLSASMIKRYDEHHQDLTLLKALVRQQLPEKYKEIFFDQSKNGYAGYIDGGASQEEFYKFIKPILEKMDGTEELLVKLNREDLLRKQRTFDNGSIPHQIHLGELHAILRRQEDFYPFLKDNREKIEKILTFRIPYYVGPLARGNSRFAWMTRKSEETITPWNFEEVVDKGASAQSFIERMTNFDKNLPNEKVLPKHSLLYEYFTVYNELTKVKYVTEGMRKPAFLSGEQKKAIVDLLFKTNRKVTVKQLKEDYFKKIECFDSVEISGVEDRFNASLGTYHDLLKIIKDKDFLDNEENEDILEDIVLTLTLFEDREMIEERLKTYAHLFDDKVMKQLKRRRYTGWGRLSRKLINGIRDKQSGKTILDFLKSDGFANRNFMQLIHDDSLTFKEDIQKAQVSGQGDSLHEHIANLAGSPAIKKGILQTVKVVDELVKVMGRHKPENIVIEMARENQTTQKGQKNSRERMKRIEEGIKELGSQILKEHPVENTQLQNEKLYLYYLQNGRDMYVDQELDINRLSDYDVDHIVPQSFLKDDSIDNKVLTRSDKARGKSDNVPSEEVVKKMKNYWRQLLNAKLITQRKFDNLTKAERGGLSELDKAGFIKRQLVETRQITKHVAQILDSRMNTKYDENDKLIREVKVITLKSKLVSDFRKDFQFYKVREINNYHHAHDAYLNAVVGTALIKKYPKLESEFVYGDYKVYDVRKMIAKSEQEIGKATAKYFFYSNIMNFFKTEITLANGEIRKRPLIETNGETGEIVWDKGRDFATVRKVLSMPQVNIVKKTEVQTGGFSKESILPKRNSDKLIARKKDWDPKKYGGFDSPTVAYSVLVVAKVEKGKSKKLKSVKELLGITIMERSSFEKNPIDFLEAKGYKEVKKDLIIKLPKYSLFELENGRKRMLASAGELQKGNELALPSKYVNFLYLASHYEKLKGSPEDNEQKQLFVEQHKHYLDEIIEQISEFSKRVILADANLDKVLSAYNKHRDKPIREQAENIIHLFTLTNLGAPAAFKYFDTTIDRKRYTSTKEVLDATLIHQSITGLYETRIDLSQLGGDGGSGSETPGTSESATPESGGPLGTSDSPVTHADPIDWKSEEPVWVDQWPLTQEKLSAAQQLVQEQLRLGHIEPSTSAWNSPIFVIKKKSGKWRLLQDLRKVNETMMHMGALQPGLPTPSPIPDKSYIIVIDLKDCFYTIPLAPQDCKRFAFSLPSVNFKEPMQRYQWRVLPQGMTNSPTLCQKFVATAIAPVRQRFPQLYLVHYMDDILLAHTDEHLLYQAFSILKQHLSLNGLVIADEKIQTHFPYNYLGFSLYPRVYNTQLVKLQTDHLKTLNDFQKLLGDINWIRPYLKLPTYTLQPLFDILKGDSDPASPRTLSLEGRTALQSIEEAIRQQQITYCDYQRSWGLYILPTPRAPTGVLYQDKPLRWIYLSATPTKHLLPYYELVAKIIAKGRHEAIQYFGMEPPFICVPYALEQQDWLFQFSDNWSIAFANYPGQITHHYPSDKLLQFASSHAFIFPKIVRRQPIPEATLIFTDGSSNGTAALIINHQTYYAQTSFSSAQVVELFAVHQALLTVPTSFNLFTDSSYVVGALQMIETVPIIGTTSPEVLNLFTLIQQVLHCRQHPCFFGHIRAHSTLPGALVQGNHTADVLTKQVFFQSAGKRTADGSEFEKRTADGSEFESPKKKAKVE

SEQ ID NO: 7693 - protein, 2223 aa, synthetic construct
MPAAKRVKLDGGDKKYSIGLDIGTNSVGWAVITDEYKVPSKKFKVLGNTDRHSIKKNLIGALLFDSGETAEATRLKRTARRRYTRRKNRICYLQEIFSNEMAKVDDSFFHRLEESFLVEEDKKHERHPIFGNIVDEVAYHEKYPTIYHLRKKLVDSTDKADLRLIYLALAHMIKFRGHFLIEGDLNPDNSDVDKLFIQLVQTYNQLFEENPINASGVDAKAILSARLSKSRRLENLIAQLPGEKKNGLFGNLIALSLGLTPNFKSNFDLAEDAKLQLSKDTYDDDLDNLLAQIGDQYADLFLAAKNLSDAILLSDILRVNTEITKAPLSASMIKRYDEHHQDLTLLKALVRQQLPEKYKEIFFDQSKNGYAGYIDGGASQEEFYKFIKPILEKMDGTEELLVKLNREDLLRKQRTFDNGSIPHQIHLGELHAILRRQEDFYPFLKDNREKIEKILTFRIPYYVGPLARGNSRFAWMTRKSEETITPWNFEEVVDKGASAQSFIERMTNFDKNLPNEKVLPKHSLLYEYFTVYNELTKVKYVTEGMRKPAFLSGEQKKAIVDLLFKTNRKVTVKQLKEDYFKKIECFDSVEISGVEDRFNASLGTYHDLLKIIKDKDFLDNEENEDILEDIVLTLTLFEDREMIEERLKTYAHLFDDKVMKQLKRRRYTGWGRLSRKLINGIRDKQSGKTILDFLKSDGFANRNFMQLIHDDSLTFKEDIQKAQVSGQGDSLHEHIANLAGSPAIKKGILQTVKVVDELVKVMGRHKPENIVIEMARENQTTQKGQKNSRERMKRIEEGIKELGSQILKEHPVENTQLQNEKLYLYYLQNGRDMYVDQELDINRLSDYDVDHIVPQSFLKDDSIDNKVLTRSDKARGKSDNVPSEEVVKKMKNYWRQLLNAKLITQRKFDNLTKAERGGLSELDKAGFIKRQLVETRQITKHVAQILDSRMNTKYDENDKLIREVKVITLKSKLVSDFRKDFQFYKVREINNYHHAHDAYLNAVVGTALIKKYPKLESEFVYGDYKVYDVRKMIAKSEQEIGKATAKYFFYSNIMNFFKTEITLANGEIRKRPLIETNGETGEIVWDKGRDFATVRKVLSMPQVNIVKKTEVQTGGFSKESILPKRNSDKLIARKKDWDPKKYGGFDSPTVAYSVLVVAKVEKGKSKKLKSVKELLGITIMERSSFEKNPIDFLEAKGYKEVKKDLIIKLPKYSLFELENGRKRMLASAGELQKGNELALPSKYVNFLYLASHYEKLKGSPEDNEQKQLFVEQHKHYLDEIIEQISEFSKRVILADANLDKVLSAYNKHRDKPIREQAENIIHLFTLTNLGAPAAFKYFDTTIDRKRYTSTKEVLDATLIHQSITGLYETRIDLSQLGGDGGSGSETPGTSESATPESGGTLGDQGSRGSDPLPEPRVTLTVEGIPTEFLVNTGAEHSVLTKPMGKMGSKRTVVAGATGSKVYPWTTKRLLKIGQKQVTHSFLVIPECPAPLLGRDLLTKLKAQIQFSTEGPQVTWEDRPAMCLVLNLEEEYRLHEKPVPPSIDPSWLQLFPMVWAEKAGMGLANQVPPVVVELKSDASPVAVRQYPMSKEAREGIRPHIQRFLDLGILVPCQSPWNTPLLPVKKPGTNDYRPVQDLREVNKRVQDIHPTVPNPYNLLSSLPPSHTWYSVLDLKDAFFCLKLHPNSQPLFAFEWRDPEKGNTGQLTWTRLPQGFKNSPTLFDEALHRDLASFRALNPQVVMLQYVDDLLVAAPTYRDCKEGTRRLLQELSKLGYRVSAKKAQLCREEVTYLGYLLKGGKRWLTPARKATVMKIPTPTTPRQVREFLGTAGFCRLWIPGFASLAAPLYPLTREKVPFTWTEAHQEAFGRIKEALLSAPALALPDLTKPFALYVDEKEGVARGVLTQTLGPWRRPVAYLSKKLDPVASGWPTCLKAIAAVALLLKDADKLTLGQNVLVIAPHNLESIVRQPPDRWMTNARMTHYQSLLLNERVSFAPPAILNPATLLPVESDDTPIHICSEILAEETGTRPDLRDQPLPGVPAWYTDGSSFIMDGRRQAGAAIVDNKRTVWASNLPEGTSAQKAELIALTQALRLAEGKSINIYTDSRYAFATAHVHGAIYKQRGLLTSAGKDIKNKEEILALLEAIHLPKRVAIIHCPGHQRGTDPVATGNRKADEAAKQAAQSTRILTETTKNAGKRTADGSEFEKRTADGSEFESPKKKAKVE

SEQ ID NO: 7694 - protein, 2132 aa, synthetic construct
MPAAKRVKLDGGDKKYSIGLDIGTNSVGWAVITDEYKVPSKKFKVLGNTDRHSIKKNLIGALLFDSGETAEATRLKRTARRRYTRRKNRICYLQEIFSNEMAKVDDSFFHRLEESFLVEEDKKHERHPIFGNIVDEVAYHEKYPTIYHLRKKLVDSTDKADLRLIYLALAHMIKFRGHFLIEGDLNPDNSDVDKLFIQLVQTYNQLFEENPINASGVDAKAILSARLSKSRRLENLIAQLPGEKKNGLFGNLIALSLGLTPNFKSNFDLAEDAKLQLSKDTYDDDLDNLLAQIGDQYADLFLAAKNLSDAILLSDILRVNTEITKAPLSASMIKRYDEHHQDLTLLKALVRQQLPEKYKEIFFDQSKNGYAGYIDGGASQEEFYKFIKPILEKMDGTEELLVKLNREDLLRKQRTFDNGSIPHQIHLGELHAILRRQEDFYPFLKDNREKIEKILTFRIPYYVGPLARGNSRFAWMTRKSEETITPWNFEEVVDKGASAQSFIERMTNFDKNLPNEKVLPKHSLLYEYFTVYNELTKVKYVTEGMRKPAFLSGEQKKAIVDLLFKTNRKVTVKQLKEDYFKKIECFDSVEISGVEDRFNASLGTYHDLLKIIKDKDFLDNEENEDILEDIVLTLTLFEDREMIEERLKTYAHLFDDKVMKQLKRRRYTGWGRLSRKLINGIRDKQSGKTILDFLKSDGFANRNFMQLIHDDSLTFKEDIQKAQVSGQGDSLHEHIANLAGSPAIKKGILQTVKVVDELVKVMGRHKPENIVIEMARENQTTQKGQKNSRERMKRIEEGIKELGSQILKEHPVENTQLQNEKLYLYYLQNGRDMYVDQELDINRLSDYDVDHIVPQSFLKDDSIDNKVLTRSDKARGKSDNVPSEEVVKKMKNYWRQLLNAKLITQRKFDNLTKAERGGLSELDKAGFIKRQLVETRQITKHVAQILDSRMNTKYDENDKLIREVKVITLKSKLVSDFRKDFQFYKVREINNYHHAHDAYLNAVVGTALIKKYPKLESEFVYGDYKVYDVRKMIAKSEQEIGKATAKYFFYSNIMNFFKTEITLANGEIRKRPLIETNGETGEIVWDKGRDFATVRKVLSMPQVNIVKKTEVQTGGFSKESILPKRNSDKLIARKKDWDPKKYGGFDSPTVAYSVLVVAKVEKGKSKKLKSVKELLGITIMERSSFEKNPIDFLEAKGYKEVKKDLIIKLPKYSLFELENGRKRMLASAGELQKGNELALPSKYVNFLYLASHYEKLKGSPEDNEQKQLFVEQHKHYLDEIIEQISEFSKRVILADANLDKVLSAYNKHRDKPIREQAENIIHLFTLTNLGAPAAFKYFDTTIDRKRYTSTKEVLDATLIHQSITGLYETRIDLSQLGGDGGSGSETPGTSESATPESGGLLGRDLLTKLKAQIQFSTEGPQVTWEDRPAMCLVLNLEEEYRLHEKPVPPSIDPSWLQLFPMVWAEKAGMGLANQVPPVVVELKSDASPVAVRQYPMSKEAREGIRPHIQRFLDLGILVPCQSPWNTPLLPVKKPGTNDYRPVQDLREVNKRVQDIHPTVPNPYNLLSSLPPSHTWYSVLDLKDAFFCLKLHPNSQPLFAFEWRDPEKGNTGQLTWTRLPQGFKNSPTLFNEALHRDLASFRALNPQVVMLQYVDDLLVAAPTYRDCKEGTRRLLQELSKLGYRVSAKKAQLCREEVTYLGYLLKGGKRWLTPARKATVMKIPTPTTPRQVREFLGKAGFCRLFIPGFASLAAPLYPLTRPKVPFTWTEAHQEAFGRIKEALLSAPALALPDLTKPFALYVDEKEGVARGVLTQTLGPWRRPVAYLSKKLDPVASGWPTCLKAIAAVALLLKDADKLTLGQNVLVIAPHNLESIVRQPPDRWMTNARMTHYQSLLLNERVSFAPPAILNPATLLPVESDDTPIHICSEILAEETGTRPDLRDQPLPGVPAWYTDGSSFIMDGRRQAGAAIVDNKRTVWASNLPEGTSAQKAELIALTQALRLAEGKSINIYTDSRYAFATAHVHGAIYKQRGWLTSAGKDIKNKEEILALLEAIHLPKRVAIIHCPGHQRGTDPVATGNRKADEAAKQAAQSTRILTETTKNAGKRTADGSEFEKRTADGSEFESPKKKAKVE

SEQ ID NO: 7695 - protein, 2223 aa, synthetic construct
MPAAKRVKLDGGDKKYSIGLDIGTNSVGWAVITDEYKVPSKKFKVLGNTDRHSIKKNLIGALLFDSGETAEATRLKRTARRRYTRRKNRICYLQEIFSNEMAKVDDSFFHRLEESFLVEEDKKHERHPIFGNIVDEVAYHEKYPTIYHLRKKLVDSTDKADLRLIYLALAHMIKFRGHFLIEGDLNPDNSDVDKLFIQLVQTYNQLFEENPINASGVDAKAILSARLSKSRRLENLIAQLPGEKKNGLFGNLIALSLGLTPNFKSNFDLAEDAKLQLSKDTYDDDLDNLLAQIGDQYADLFLAAKNLSDAILLSDILRVNTEITKAPLSASMIKRYDEHHQDLTLLKALVRQQLPEKYKEIFFDQSKNGYAGYIDGGASQEEFYKFIKPILEKMDGTEELLVKLNREDLLRKQRTFDNGSIPHQIHLGELHAILRRQEDFYPFLKDNREKIEKILTFRIPYYVGPLARGNSRFAWMTRKSEETITPWNFEEVVDKGASAQSFIERMTNFDKNLPNEKVLPKHSLLYEYFTVYNELTKVKYVTEGMRKPAFLSGEQKKAIVDLLFKTNRKVTVKQLKEDYFKKIECFDSVEISGVEDRFNASLGTYHDLLKIIKDKDFLDNEENEDILEDIVLTLTLFEDREMIEERLKTYAHLFDDKVMKQLKRRRYTGWGRLSRKLINGIRDKQSGKTILDFLKSDGFANRNFMQLIHDDSLTFKEDIQKAQVSGQGDSLHEHIANLAGSPAIKKGILQTVKVVDELVKVMGRHKPENIVIEMARENQTTQKGQKNSRERMKRIEEGIKELGSQILKEHPVENTQLQNEKLYLYYLQNGRDMYVDQELDINRLSDYDVDHIVPQSFLKDDSIDNKVLTRSDKARGKSDNVPSEEVVKKMKNYWRQLLNAKLITQRKFDNLTKAERGGLSELDKAGFIKRQLVETRQITKHVAQILDSRMNTKYDENDKLIREVKVITLKSKLVSDFRKDFQFYKVREINNYHHAHDAYLNAVVGTALIKKYPKLESEFVYGDYKVYDVRKMIAKSEQEIGKATAKYFFYSNIMNFFKTEITLANGEIRKRPLIETNGETGEIVWDKGRDFATVRKVLSMPQVNIVKKTEVQTGGFSKESILPKRNSDKLIARKKDWDPKKYGGFDSPTVAYSVLVVAKVEKGKSKKLKSVKELLGITIMERSSFEKNPIDFLEAKGYKEVKKDLIIKLPKYSLFELENGRKRMLASAGELQKGNELALPSKYVNFLYLASHYEKLKGSPEDNEQKQLFVEQHKHYLDEIIEQISEFSKRVILADANLDKVLSAYNKHRDKPIREQAENIIHLFTLTNLGAPAAFKYFDTTIDRKRYTSTKEVLDATLIHQSITGLYETRIDLSQLGGDGGSGSETPGTSESATPESGGTLGDQGSRGSDPLPEPRVTLTVEGIPTEFLVNTGAEHSVLTKPMGKMGSKRTVVAGATGSKVYPWTTKRLLKIGQKQVTHSFLVIPECPAPLLGRDLLTKLKAQIQFSTEGPQVTWEDRPAMCLVLNLEEEYRLHEKPVPPSIDPSWLQLFPMVWAEKAGMGLANQVPPVVVELKSDASPVAVRQYPMSKEAREGIRPHIQRFLDLGILVPCQSPWNTPLLPVKKPGTNDYRPVQDLREVNKRVQDIHPTVPNPYNLLSSLPPSHTWYSVLDLKDAFFCLKLHPNSQPLFAFEWRDPEKGNTGQLTWTRLPQGFKNSPTLFNEALHRDLASFRALNPQVVMLQYVDDLLVAAPTYRDCKEGTRRLLQELSKLGYRVSAKKAQLCREEVTYLGYLLKGGKRWLTPARKATVMKIPTPTTPRQVREFLGTAGFCRLWIPGFASLAAPLYPLTRPKVPFTWTEAHQEAFGRIKEALLSAPALALPDLTKPFALYVDEKEGVARGVLTQTLGPWRRPVAYLSKKLDPVASGWPTCLKAIAAVALLLKDADKLTLGQNVLVIAPHNLESIVRQPPDRWMTNARMTHYQSLLLNERVSFAPPAILNPATLLPVESDDTPIHICSEILAEETGTRPDLRDQPLPGVPAWYTDGSSFIMDGRRQAGAAIVDNKRTVWASNLPEGTSAQKAELIALTQALRLAEGKSINIYTDSRYAFATAHVHGAIYKQRGWLTSAGKDIKNKEEILALLEAIHLPKRVAIIHCPGHQRGTDPVATGNRKADEAAKQAAQSTRILTETTKNAGKRTADGSEFEKRTADGSEFESPKKKAKVE

SEQ ID NO: 7696 - protein, 2101 aa, synthetic construct
MPAAKRVKLDGGDKKYSIGLDIGTNSVGWAVITDEYKVPSKKFKVLGNTDRHSIKKNLIGALLFDSGETAEATRLKRTARRRYTRRKNRICYLQEIFSNEMAKVDDSFFHRLEESFLVEEDKKHERHPIFGNIVDEVAYHEKYPTIYHLRKKLVDSTDKADLRLIYLALAHMIKFRGHFLIEGDLNPDNSDVDKLFIQLVQTYNQLFEENPINASGVDAKAILSARLSKSRRLENLIAQLPGEKKNGLFGNLIALSLGLTPNFKSNFDLAEDAKLQLSKDTYDDDLDNLLAQIGDQYADLFLAAKNLSDAILLSDILRVNTEITKAPLSASMIKRYDEHHQDLTLLKALVRQQLPEKYKEIFFDQSKNGYAGYIDGGASQEEFYKFIKPILEKMDGTEELLVKLNREDLLRKQRTFDNGSIPHQIHLGELHAILRRQEDFYPFLKDNREKIEKILTFRIPYYVGPLARGNSRFAWMTRKSEETITPWNFEEVVDKGASAQSFIERMTNFDKNLPNEKVLPKHSLLYEYFTVYNELTKVKYVTEGMRKPAFLSGEQKKAIVDLLFKTNRKVTVKQLKEDYFKKIECFDSVEISGVEDRFNASLGTYHDLLKIIKDKDFLDNEENEDILEDIVLTLTLFEDREMIEERLKTYAHLFDDKVMKQLKRRRYTGWGRLSRKLINGIRDKQSGKTILDFLKSDGFANRNFMQLIHDDSLTFKEDIQKAQVSGQGDSLHEHIANLAGSPAIKKGILQTVKVVDELVKVMGRHKPENIVIEMARENQTTQKGQKNSRERMKRIEEGIKELGSQILKEHPVENTQLQNEKLYLYYLQNGRDMYVDQELDINRLSDYDVDHIVPQSFLKDDSIDNKVLTRSDKARGKSDNVPSEEVVKKMKNYWRQLLNAKLITQRKFDNLTKAERGGLSELDKAGFIKRQLVETRQITKHVAQILDSRMNTKYDENDKLIREVKVITLKSKLVSDFRKDFQFYKVREINNYHHAHDAYLNAVVGTALIKKYPKLESEFVYGDYKVYDVRKMIAKSEQEIGKATAKYFFYSNIMNFFKTEITLANGEIRKRPLIETNGETGEIVWDKGRDFATVRKVLSMPQVNIVKKTEVQTGGFSKESILPKRNSDKLIARKKDWDPKKYGGFDSPTVAYSVLVVAKVEKGKSKKLKSVKELLGITIMERSSFEKNPIDFLEAKGYKEVKKDLIIKLPKYSLFELENGRKRMLASAGELQKGNELALPSKYVNFLYLASHYEKLKGSPEDNEQKQLFVEQHKHYLDEIIEQISEFSKRVILADANLDKVLSAYNKHRDKPIREQAENIIHLFTLTNLGAPAAFKYFDTTIDRKRYTSTKEVLDATLIHQSITGLYETRIDLSQLGGDGGSGSETPGTSESATPESGGTLNLEDEYRLYETSAEPEVSPGSTWLSDFPQAWAETGGMGLAVRQAPLIIPLKATSTPVSIKQYPMSQEAKLGIKPHIQRLLDQGILVPCQSPWNTPLLPVKKPGTNDYRPVQDLREVNKRVEDIHPTVPNPYNLLSGLPPSHRWYTVLDLKDAFFCLRLHPTSQPLFAFEWRDPGMGISGQLTWTRLPQGFKNSPTLFNEALHRDLADFRIQHPDLILLQYVDDILLAATSELDCQQGTRALLLTLGNLGYRASAKKAQLCQKQVKYLGYLLKEGQRWLTEARKETVMGQPTPKTPRQLREFLGTAGFCRLWIPGFAEMAAPLYPLTKPGTLFNWGPDQQKAYQEIKQALLTAPALGLPDLTKPFELFVDEKQGYAKGVLTQKLGPWRRPVAYLSKKLDPVAAGWPPCLRMVAAIAVLRKDAGKLTMGQPLVILAPHAVEALVKQPPDRWLSNARMTHYQAMLLDTDRVQFGPVVALNPATLLPLPEEGAPHDCLEILAETHGTRPDLTDQPIPDADHTWYTDGSSFLQEGQRKAGAAVTTETEVIWARALPAGTSAQRAELIALTQALKMAEGKRLNVYTDSRYAFATAHIHGEIYRRRGWLTSEGREIKNKSEILALLKALFLPKRLSIIHCLGHQKGDSAEARGNRLADQAAREAAIKTPPDTSTLLAGKRTADGSEFEKRTADGSEFESPKKKAKVE

SEQ ID NO: 7697 - protein, 2101 aa, synthetic construct
MPAAKRVKLDGGDKKYSIGLDIGTNSVGWAVITDEYKVPSKKFKVLGNTDRHSIKKNLIGALLFDSGETAEATRLKRTARRRYTRRKNRICYLQEIFSNEMAKVDDSFFHRLEESFLVEEDKKHERHPIFGNIVDEVAYHEKYPTIYHLRKKLVDSTDKADLRLIYLALAHMIKFRGHFLIEGDLNPDNSDVDKLFIQLVQTYNQLFEENPINASGVDAKAILSARLSKSRRLENLIAQLPGEKKNGLFGNLIALSLGLTPNFKSNFDLAEDAKLQLSKDTYDDDLDNLLAQIGDQYADLFLAAKNLSDAILLSDILRVNTEITKAPLSASMIKRYDEHHQDLTLLKALVRQQLPEKYKEIFFDQSKNGYAGYIDGGASQEEFYKFIKPILEKMDGTEELLVKLNREDLLRKQRTFDNGSIPHQIHLGELHAILRRQEDFYPFLKDNREKIEKILTFRIPYYVGPLARGNSRFAWMTRKSEETITPWNFEEVVDKGASAQSFIERMTNFDKNLPNEKVLPKHSLLYEYFTVYNELTKVKYVTEGMRKPAFLSGEQKKAIVDLLFKTNRKVTVKQLKEDYFKKIECFDSVEISGVEDRFNASLGTYHDLLKIIKDKDFLDNEENEDILEDIVLTLTLFEDREMIEERLKTYAHLFDDKVMKQLKRRRYTGWGRLSRKLINGIRDKQSGKTILDFLKSDGFANRNFMQLIHDDSLTFKEDIQKAQVSGQGDSLHEHIANLAGSPAIKKGILQTVKVVDELVKVMGRHKPENIVIEMARENQTTQKGQKNSRERMKRIEEGIKELGSQILKEHPVENTQLQNEKLYLYYLQNGRDMYVDQELDINRLSDYDVDHIVPQSFLKDDSIDNKVLTRSDKARGKSDNVPSEEVVKKMKNYWRQLLNAKLITQRKFDNLTKAERGGLSELDKAGFIKRQLVETRQITKHVAQILDSRMNTKYDENDKLIREVKVITLKSKLVSDFRKDFQFYKVREINNYHHAHDAYLNAVVGTALIKKYPKLESEFVYGDYKVYDVRKMIAKSEQEIGKATAKYFFYSNIMNFFKTEITLANGEIRKRPLIETNGETGEIVWDKGRDFATVRKVLSMPQVNIVKKTEVQTGGFSKESILPKRNSDKLIARKKDWDPKKYGGFDSPTVAYSVLVVAKVEKGKSKKLKSVKELLGITIMERSSFEKNPIDFLEAKGYKEVKKDLIIKLPKYSLFELENGRKRMLASAGELQKGNELALPSKYVNFLYLASHYEKLKGSPEDNEQKQLFVEQHKHYLDEIIEQISEFSKRVILADANLDKVLSAYNKHRDKPIREQAENIIHLFTLTNLGAPAAFKYFDTTIDRKRYTSTKEVLDATLIHQSITGLYETRIDLSQLGGDGGSGSETPGTSESATPESGGTLNLEDEYRLYETSAEPEVSPGSTWLSDFPQAWAETGGMGLAVRQAPLIIPLKATSTPVSIKQYPMSQEAKLGIKPHIQRLLDQGILVPCQSPWNTPLLPVKKPGTNDYRPVQDLREVNKRVEDIHPTVPNPYNLLSGLPPSHRWYTVLDLKDAFFCLRLHPTSQPLFAFEWRDPGMGISGQLTWTRLPQGFKNSPTLFNEALHRDLADFRIQHPDLILLQYVDDILLAATSELDCQQGTRALLLTLGNLGYRASAKKAQLCQKQVKYLGYLLKEGQRWLTEARKETVMGQPTPKTPRQLREFLGKAGFCRLFIPGFAEMAAPLYPLTKPGTLFNWGPDQQKAYQEIKQALLTAPALGLPDLTKPFELFVDEKQGYAKGVLTQKLGPWRRPVAYLSKKLDPVAAGWPPCLRMVAAIAVLRKDAGKLTMGQPLVILAPHAVEALVKQPPDRWLSNARMTHYQAMLLDTDRVQFGPVVALNPATLLPLPEEGAPHDCLEILAETHGTRPDLTDQPIPDADHTWYTDGSSFLQEGQRKAGAAVTTETEVIWARALPAGTSAQRAELIALTQALKMAEGKRLNVYTDSRYAFATAHIHGEIYRRRGWLTSEGREIKNKSEILALLKALFLPKRLSIIHCLGHQKGDSAEARGNRLADQAAREAAIKTPPDTSTLLAGKRTADGSEFEKRTADGSEFESPKKKAKVE

SEQ ID NO: 7698 - protein, 2101 aa, synthetic construct
MPAAKRVKLDGGDKKYSIGLDIGTNSVGWAVITDEYKVPSKKFKVLGNTDRHSIKKNLIGALLFDSGETAEATRLKRTARRRYTRRKNRICYLQEIFSNEMAKVDDSFFHRLEESFLVEEDKKHERHPIFGNIVDEVAYHEKYPTIYHLRKKLVDSTDKADLRLIYLALAHMIKFRGHFLIEGDLNPDNSDVDKLFIQLVQTYNQLFEENPINASGVDAKAILSARLSKSRRLENLIAQLPGEKKNGLFGNLIALSLGLTPNFKSNFDLAEDAKLQLSKDTYDDDLDNLLAQIGDQYADLFLAAKNLSDAILLSDILRVNTEITKAPLSASMIKRYDEHHQDLTLLKALVRQQLPEKYKEIFFDQSKNGYAGYIDGGASQEEFYKFIKPILEKMDGTEELLVKLNREDLLRKQRTFDNGSIPHQIHLGELHAILRRQEDFYPFLKDNREKIEKILTFRIPYYVGPLARGNSRFAWMTRKSEETITPWNFEEVVDKGASAQSFIERMTNFDKNLPNEKVLPKHSLLYEYFTVYNELTKVKYVTEGMRKPAFLSGEQKKAIVDLLFKTNRKVTVKQLKEDYFKKIECFDSVEISGVEDRFNASLGTYHDLLKIIKDKDFLDNEENEDILEDIVLTLTLFEDREMIEERLKTYAHLFDDKVMKQLKRRRYTGWGRLSRKLINGIRDKQSGKTILDFLKSDGFANRNFMQLIHDDSLTFKEDIQKAQVSGQGDSLHEHIANLAGSPAIKKGILQTVKVVDELVKVMGRHKPENIVIEMARENQTTQKGQKNSRERMKRIEEGIKELGSQILKEHPVENTQLQNEKLYLYYLQNGRDMYVDQELDINRLSDYDVDHIVPQSFLKDDSIDNKVLTRSDKARGKSDNVPSEEVVKKMKNYWRQLLNAKLITQRKFDNLTKAERGGLSELDKAGFIKRQLVETRQITKHVAQILDSRMNTKYDENDKLIREVKVITLKSKLVSDFRKDFQFYKVREINNYHHAHDAYLNAVVGTALIKKYPKLESEFVYGDYKVYDVRKMIAKSEQEIGKATAKYFFYSNIMNFFKTEITLANGEIRKRPLIETNGETGEIVWDKGRDFATVRKVLSMPQVNIVKKTEVQTGGFSKESILPKRNSDKLIARKKDWDPKKYGGFDSPTVAYSVLVVAKVEKGKSKKLKSVKELLGITIMERSSFEKNPIDFLEAKGYKEVKKDLIIKLPKYSLFELENGRKRMLASAGELQKGNELALPSKYVNFLYLASHYEKLKGSPEDNEQKQLFVEQHKHYLDEIIEQISEFSKRVILADANLDKVLSAYNKHRDKPIREQAENIIHLFTLTNLGAPAAFKYFDTTIDRKRYTSTKEVLDATLIHQSITGLYETRIDLSQLGGDGGSGSETPGTSESATPESGGTLGIEDEYRLHETSTEPDVSLGSTWLSDFPQAWAETGGMGLAVRQAPLIIPLKATSTPVSIQQYPMSHEARLGIKPHIQRLLDQGILVPCQSPWNTPLLPVKKPGTNDYRPVQDLREVNKRVEDIHPTVPNPYNLLSGLPPSHQWYTVLDLKDAFFCLRLHPTSQPLFAFEWRDPGMGISGQLTWTRLPQGFKNSPTLFNEALHRDLADFRIQHPDLILLQYVDDILLAATSELDCQQGTRALLQTLGDLGYRASAKKAQICQKQVKYLGYLLREGQRWLTEARKETVMGQPVPKTPRQLREFLGTAGFCRLWIPGFAEMAAPLYPLTKPGTLFSWGPDQQKAYQEIKQALLTAPALGLPDLTKPFELFVDEKQGYAKGVLTQKLGPWRRPVAYLSKKLDPVAAGWPPCLRMVAAIAVLTKDAGKLTMGQPLVILAPHAVEALVKQPPDRWLSNARMTHYQAMLLDTDRVQFGPVVALNPATLLPLPEEGAPHDCLEILAETHGTRPDLTDQPIPDADHTWYTDGSSFLQEGQRKAGAAVTTETEVIWAGALPAGTSAQRAELIALTQALKMAEGKRLNVYTDSRYAFATAHIHGEIYRRRGWLTSEGREIKNKSEILALLKALFLPKRLSIIHCLGHQKGDSAEARGNRLADQAAREAAIKTPPDTSTLLAGKRTADGSEFEKRTADGSEFESPKKKAKVE

SEQ ID NO: 7699 - protein, 2101 aa, synthetic construct
MPAAKRVKLDGGDKKYSIGLDIGTNSVGWAVITDEYKVPSKKFKVLGNTDRHSIKKNLIGALLFDSGETAEATRLKRTARRRYTRRKNRICYLQEIFSNEMAKVDDSFFHRLEESFLVEEDKKHERHPIFGNIVDEVAYHEKYPTIYHLRKKLVDSTDKADLRLIYLALAHMIKFRGHFLIEGDLNPDNSDVDKLFIQLVQTYNQLFEENPINASGVDAKAILSARLSKSRRLENLIAQLPGEKKNGLFGNLIALSLGLTPNFKSNFDLAEDAKLQLSKDTYDDDLDNLLAQIGDQYADLFLAAKNLSDAILLSDILRVNTEITKAPLSASMIKRYDEHHQDLTLLKALVRQQLPEKYKEIFFDQSKNGYAGYIDGGASQEEFYKFIKPILEKMDGTEELLVKLNREDLLRKQRTFDNGSIPHQIHLGELHAILRRQEDFYPFLKDNREKIEKILTFRIPYYVGPLARGNSRFAWMTRKSEETITPWNFEEVVDKGASAQSFIERMTNFDKNLPNEKVLPKHSLLYEYFTVYNELTKVKYVTEGMRKPAFLSGEQKKAIVDLLFKTNRKVTVKQLKEDYFKKIECFDSVEISGVEDRFNASLGTYHDLLKIIKDKDFLDNEENEDILEDIVLTLTLFEDREMIEERLKTYAHLFDDKVMKQLKRRRYTGWGRLSRKLINGIRDKQSGKTILDFLKSDGFANRNFMQLIHDDSLTFKEDIQKAQVSGQGDSLHEHIANLAGSPAIKKGILQTVKVVDELVKVMGRHKPENIVIEMARENQTTQKGQKNSRERMKRIEEGIKELGSQILKEHPVENTQLQNEKLYLYYLQNGRDMYVDQELDINRLSDYDVDHIVPQSFLKDDSIDNKVLTRSDKARGKSDNVPSEEVVKKMKNYWRQLLNAKLITQRKFDNLTKAERGGLSELDKAGFIKRQLVETRQITKHVAQILDSRMNTKYDENDKLIREVKVITLKSKLVSDFRKDFQFYKVREINNYHHAHDAYLNAVVGTALIKKYPKLESEFVYGDYKVYDVRKMIAKSEQEIGKATAKYFFYSNIMNFFKTEITLANGEIRKRPLIETNGETGEIVWDKGRDFATVRKVLSMPQVNIVKKTEVQTGGFSKESILPKRNSDKLIARKKDWDPKKYGGFDSPTVAYSVLVVAKVEKGKSKKLKSVKELLGITIMERSSFEKNPIDFLEAKGYKEVKKDLIIKLPKYSLFELENGRKRMLASAGELQKGNELALPSKYVNFLYLASHYEKLKGSPEDNEQKQLFVEQHKHYLDEIIEQISEFSKRVILADANLDKVLSAYNKHRDKPIREQAENIIHLFTLTNLGAPAAFKYFDTTIDRKRYTSTKEVLDATLIHQSITGLYETRIDLSQLGGDGGSGSETPGTSESATPESGGTLNIEDEYRLHETSKEPDVSLGSTWLSDFPQAWAETGGMGLAVRQAPLIIPLKATSTPVSIKQYPMSQEARLGIKPHIQRLLDQGILVPCQSPWNTPLLPVKKPGTNDYRPVQDLREVNKRVEDIHPTVPNPYNLLSGLPPSHQWYTVLDLKDAFFCLRLHPTSQPLFAFEWRDPEMGISGQLTWTRLPQGFKNSPTLFNEALHRDLAGFRIQHPDLILLQYVDDLLLAATSELDCQQGTRALLQTLGDLGYRASAKKAQICQKQVKYLGYLLKEGQRWLTEARKETVMGQPIPKTPRQLREFLGTAGFCRLWIPGFAEMAAPLYPLTKPGTLFNWGPDQQKAFQEIKQALLTAPALGLPDLTKPFELFVDEKQGYAKGVLTQKLGPWRRPVAYLSKKLDPVAAGWPPCLRMVAAIAVLTKDAGKLTMGQPLVILAPHAVEALVKQPPDRWLSNARMTHYQALLLDTDRVQFGPVVALNPATLLPLPEEGLQHDCLDILAEAHGTRSDLMDQPLPDADHTWYTDGSSFLQEGQRKAGAAVTTETEVIWARALPAGTSAQRAELIALTQALKMAEGKKLNVYTDSRYAFATAHIHGEIYRRRGWLTSEGKEIKNKDEILALLKALFLPKRLSIIHCPGHQKGNSAEARGNRMADQAAREVATRETPETSTLLAGKRTADGSEFEKRTADGSEFESPKKKAKVE

SEQ ID NO: 7700 - protein, 2101 aa, synthetic construct
MPAAKRVKLDGGDKKYSIGLDIGTNSVGWAVITDEYKVPSKKFKVLGNTDRHSIKKNLIGALLFDSGETAEATRLKRTARRRYTRRKNRICYLQEIFSNEMAKVDDSFFHRLEESFLVEEDKKHERHPIFGNIVDEVAYHEKYPTIYHLRKKLVDSTDKADLRLIYLALAHMIKFRGHFLIEGDLNPDNSDVDKLFIQLVQTYNQLFEENPINASGVDAKAILSARLSKSRRLENLIAQLPGEKKNGLFGNLIALSLGLTPNFKSNFDLAEDAKLQLSKDTYDDDLDNLLAQIGDQYADLFLAAKNLSDAILLSDILRVNTEITKAPLSASMIKRYDEHHQDLTLLKALVRQQLPEKYKEIFFDQSKNGYAGYIDGGASQEEFYKFIKPILEKMDGTEELLVKLNREDLLRKQRTFDNGSIPHQIHLGELHAILRRQEDFYPFLKDNREKIEKILTFRIPYYVGPLARGNSRFAWMTRKSEETITPWNFEEVVDKGASAQSFIERMTNFDKNLPNEKVLPKHSLLYEYFTVYNELTKVKYVTEGMRKPAFLSGEQKKAIVDLLFKTNRKVTVKQLKEDYFKKIECFDSVEISGVEDRFNASLGTYHDLLKIIKDKDFLDNEENEDILEDIVLTLTLFEDREMIEERLKTYAHLFDDKVMKQLKRRRYTGWGRLSRKLINGIRDKQSGKTILDFLKSDGFANRNFMQLIHDDSLTFKEDIQKAQVSGQGDSLHEHIANLAGSPAIKKGILQTVKVVDELVKVMGRHKPENIVIEMARENQTTQKGQKNSRERMKRIEEGIKELGSQILKEHPVENTQLQNEKLYLYYLQNGRDMYVDQELDINRLSDYDVDHIVPQSFLKDDSIDNKVLTRSDKARGKSDNVPSEEVVKKMKNYWRQLLNAKLITQRKFDNLTKAERGGLSELDKAGFIKRQLVETRQITKHVAQILDSRMNTKYDENDKLIREVKVITLKSKLVSDFRKDFQFYKVREINNYHHAHDAYLNAVVGTALIKKYPKLESEFVYGDYKVYDVRKMIAKSEQEIGKATAKYFFYSNIMNFFKTEITLANGEIRKRPLIETNGETGEIVWDKGRDFATVRKVLSMPQVNIVKKTEVQTGGFSKESILPKRNSDKLIARKKDWDPKKYGGFDSPTVAYSVLVVAKVEKGKSKKLKSVKELLGITIMERSSFEKNPIDFLEAKGYKEVKKDLIIKLPKYSLFELENGRKRMLASAGELQKGNELALPSKYVNFLYLASHYEKLKGSPEDNEQKQLFVEQHKHYLDEIIEQISEFSKRVILADANLDKVLSAYNKHRDKPIREQAENIIHLFTLTNLGAPAAFKYFDTTIDRKRYTSTKEVLDATLIHQSITGLYETRIDLSQLGGDGGSGSETPGTSESATPESGGTLNIEDEYRLHETSKGPDVPLGSTWLSDFPQAWAETGGMGLAVRQAPLIIPLKATSTPVSIKQYPMSQEARLGIKPHIQRLLDQGILVPCQSPWNTPLLPVKKPGTNDYRPVQDLREVNKRVEDIHPTVPNPYNLLSGLPPSHQWYTVLDLKDAFFCLRLHPTSQSLFAFEWRDPEMGISGQLTWTRLPQGFKNSPTLFDEALHRDLADFRIQHPDLILLQYVDDLLLAATSELDCQQGTRALLQTLGDLGYRASAKKAQICQKQVKYLGYLLKEGQRWLTEARKETVMGQPTPKTPRQLREFLGTAGFCRLWIPGFAEMAAPLYPLTKTGTLFEWGPDQQKAYQEIKQALLTAPALGLPDLTKPFELFVDEKQGYAKGVLTQKLGPWRRPVAYLSKKLDPVAAGWPPCLRMVAAIAVLTKDAGKLTMGQPLVILAPHAVEALVKQPPDRWLSNARMTHYQALLLDTDRVQFGPIVALNPATLLPLPEEGLQHDCLDILAEAHGTRPDLTDQPLPDADHTWYTDGSSFLQEGQRKAGAAVTTETEVVWAKALPAGTSAQRAELIALTQALKMAEGKKLNVYTDSRYAFATAHIHGEIYRRRGLLTSEGKEIKNKDEILALLKALFLPKRLSIIHCPGHQKGNRAEARGNRMADQAAREVATRETPETSTLLAGKRTADGSEFEKRTADGSEFESPKKKAKVE

SEQ ID NO: 7701 - protein, 2095 aa, synthetic construct
MPAAKRVKLDGGDKKYSIGLDIGTNSVGWAVITDEYKVPSKKFKVLGNTDRHSIKKNLIGALLFDSGETAEATRLKRTARRRYTRRKNRICYLQEIFSNEMAKVDDSFFHRLEESFLVEEDKKHERHPIFGNIVDEVAYHEKYPTIYHLRKKLVDSTDKADLRLIYLALAHMIKFRGHFLIEGDLNPDNSDVDKLFIQLVQTYNQLFEENPINASGVDAKAILSARLSKSRRLENLIAQLPGEKKNGLFGNLIALSLGLTPNFKSNFDLAEDAKLQLSKDTYDDDLDNLLAQIGDQYADLFLAAKNLSDAILLSDILRVNTEITKAPLSASMIKRYDEHHQDLTLLKALVRQQLPEKYKEIFFDQSKNGYAGYIDGGASQEEFYKFIKPILEKMDGTEELLVKLNREDLLRKQRTFDNGSIPHQIHLGELHAILRRQEDFYPFLKDNREKIEKILTFRIPYYVGPLARGNSRFAWMTRKSEETITPWNFEEVVDKGASAQSFIERMTNFDKNLPNEKVLPKHSLLYEYFTVYNELTKVKYVTEGMRKPAFLSGEQKKAIVDLLFKTNRKVTVKQLKEDYFKKIECFDSVEISGVEDRFNASLGTYHDLLKIIKDKDFLDNEENEDILEDIVLTLTLFEDREMIEERLKTYAHLFDDKVMKQLKRRRYTGWGRLSRKLINGIRDKQSGKTILDFLKSDGFANRNFMQLIHDDSLTFKEDIQKAQVSGQGDSLHEHIANLAGSPAIKKGILQTVKVVDELVKVMGRHKPENIVIEMARENQTTQKGQKNSRERMKRIEEGIKELGSQILKEHPVENTQLQNEKLYLYYLQNGRDMYVDQELDINRLSDYDVDHIVPQSFLKDDSIDNKVLTRSDKARGKSDNVPSEEVVKKMKNYWRQLLNAKLITQRKFDNLTKAERGGLSELDKAGFIKRQLVETRQITKHVAQILDSRMNTKYDENDKLIREVKVITLKSKLVSDFRKDFQFYKVREINNYHHAHDAYLNAVVGTALIKKYPKLESEFVYGDYKVYDVRKMIAKSEQEIGKATAKYFFYSNIMNFFKTEITLANGEIRKRPLIETNGETGEIVWDKGRDFATVRKVLSMPQVNIVKKTEVQTGGFSKESILPKRNSDKLIARKKDWDPKKYGGFDSPTVAYSVLVVAKVEKGKSKKLKSVKELLGITIMERSSFEKNPIDFLEAKGYKEVKKDLIIKLPKYSLFELENGRKRMLASAGELQKGNELALPSKYVNFLYLASHYEKLKGSPEDNEQKQLFVEQHKHYLDEIIEQISEFSKRVILADANLDKVLSAYNKHRDKPIREQAENIIHLFTLTNLGAPAAFKYFDTTIDRKRYTSTKEVLDATLIHQSITGLYETRIDLSQLGGDGGSGSETPGTSESATPESGGTLQLDDEYRLYSPLVKPDQNIQFWLEQFPQAWAETAGMGLAKQVPPQVIQLKASATPVSVRQYPLSKEAQEGIRPHVQRLIQQGILVPVQSPWNTPLLPVRKPGTNDYRPVQDLREVNKRVQDIHPTVPNPYNLLCALPPQRSWYTVLDLKDAFFCLRLHPTSQPLFAFEWRDPGTGRTGQLTWTRLPQGFKNSPTIFDEALHRDLANFRIQHPQVTLLQYVDDLLLAGATKQDCLEGTKALLLELSDLGYRASAKKAQICRREVTYLGYSLRDGQRWLTEARKKTVVQIPAPTTAKQVREFLGTAGFCRLWIPGFATLAAPLYPLTKEKGEFSWAPEHQKAFDAIKKALLSAPALALPDVTKPFTLYVDERKGVARGVLTQTLGPWRRPVAYLSKKLDPVASGWPVCLKAIAAVAILVKDADKLTLGQNITVIAPHALENIVRQPPDRWMTNARMTHYQSLLLTERVTFAPPAALNPATLLPEETDEPVTHDCHQLLIEETGVRKDLTDIPLTGEVLTWFTDGSSYVVEGKRMAGAAVVDGTRTIWASSLPEGTSAQKAELMALTQALRLAEGKSINIYTDSRYAFATAHVHGAIYKQRGLLTSAGREIKNKEEILSLLEALHLPKRLAIIHCPGHQKAKDPISRGNQMADRVAKQAAQGVNLLAGKRTADGSEFEKRTADGSEFESPKKKAKVE

SEQ ID NO: 7702 - protein, 2095 aa, synthetic construct; identical to SEQ ID NO: 7701

SEQ ID NO: 7703 - protein, 2181 aa, synthetic construct
MPAAKRVKLDGGDKKYSIGLDIGTNSVGWAVITDEYKVPSKKFKVLGNTDRHSIKKNLIGALLFDSGETAEATRLKRTARRRYTRRKNRICYLQEIFSNEMAKVDDSFFHRLEESFLVEEDKKHERHPIFGNIVDEVAYHEKYPTIYHLRKKLVDSTDKADLRLIYLALAHMIKFRGHFLIEGDLNPDNSDVDKLFIQLVQTYNQLFEENPINASGVDAKAILSARLSKSRRLENLIAQLPGEKKNGLFGNLIALSLGLTPNFKSNFDLAEDAKLQLSKDTYDDDLDNLLAQIGDQYADLFLAAKNLSDAILLSDILRVNTEITKAPLSASMIKRYDEHHQDLTLLKALVRQQLPEKYKEIFFDQSKNGYAGYIDGGASQEEFYKFIKPILEKMDGTEELLVKLNREDLLRKQRTFDNGSIPHQIHLGELHAILRRQEDFYPFLKDNREKIEKILTFRIPYYVGPLARGNSRFAWMTRKSEETITPWNFEEVVDKGASAQSFIERMTNFDKNLPNEKVLPKHSLLYEYFTVYNELTKVKYVTEGMRKPAFLSGEQKKAIVDLLFKTNRKVTVKQLKEDYFKKIECFDSVEISGVEDRFNASLGTYHDLLKIIKDKDFLDNEENEDILEDIVLTLTLFEDREMIEERLKTYAHLFDDKVMKQLKRRRYTGWGRLSRKLINGIRDKQSGKTILDFLKSDGFANRNFMQLIHDDSLTFKEDIQKAQVSGQGDSLHEHIANLAGSPAIKKGILQTVKVVDELVKVMGRHKPENIVIEMARENQTTQKGQKNSRERMKRIEEGIKELGSQILKEHPVENTQLQNEKLYLYYLQNGRDMYVDQELDINRLSDYDVDHIVPQSFLKDDSIDNKVLTRSDKARGKSDNVPSEEVVKKMKNYWRQLLNAKLITQRKFDNLTKAERGGLSELDKAGFIKRQLVETRQITKHVAQILDSRMNTKYDENDKLIREVKVITLKSKLVSDFRKDFQFYKVREINNYHHAHDAYLNAVVGTALIKKYPKLESEFVYGDYKVYDVRKMIAKSEQEIGKATAKYFFYSNIMNFFKTEITLANGEIRKRPLIETNGETGEIVWDKGRDFATVRKVLSMPQVNIVKKTEVQTGGFSKESILPKRNSDKLIARKKDWDPKKYGGFDSPTVAYSVLVVAKVEKGKSKKLKSVKELLGITIMERSSFEKNPIDFLEAKGYKEVKKDLIIKLPKYSLFELENGRKRMLASAGELQKGNELALPSKYVNFLYLASHYEKLKGSPEDNEQKQLFVEQHKHYLDEIIEQISEFSKRVILADANLDKVLSAYNKHRDKPIREQAENIIHLFTLTNLGAPAAFKYFDTTIDRKRYTSTKEVLDATLIHQSITGLYETRIDLSQLGGDGGSGSETPGTSESATPESGGMDPLQLLQPLEAEIKGTKLKAHWNSGATITCVPEAFLEDERPIQTMLIKTIHGEKQQDVYYLTFKVQGRKVEAEVLASPYDYILLNPSDVPWLMKKPLQLTVLVPLHEYQERLLQQTALPKEQKELLQKLFLKYDALWQHWENQVGHRRIKPHNIATGTLAPRPQKQYPINPKAKPSIQIVIDDLLKQGVLIQQNSTMNTPVYPVPKPDGKWRMVLDYREVNKTIPLIAAQNQHSAGILSSIYRGKYKTTLDLTNGFWAHPITPESYWLTAFTWQGKQYCWTRLPQGFLNSPALFNADVVDLLKEIPNVQAYVDDIYISHDDPQEHLEQLEKIFSILLNAGYVVSLKKSEIAQREVEFLGFNITKEGRGLTDTFKQKLLNITPPKDLKQLQSILGLLNFARNFIPNYSELVKPLYTIVAPANGKFISWTEDNSNQLQHIISVLNQADNLEERNPETRLIIKVNSSPSAGYIRYYNEGSKRPIMYVNYIFSKAEAKFTQTEKLLTTMHKGLIKAMDLAMGQEILVYSPIVSMTKIQRTPLPERKALPVRWITWMTYLEDPRIQFHYDKSLPELQQIPNVTEDVIAKTKHPSEFAMVFYTDGSAIKHPDVNKSHSAGMGIAQVQFIPEYKIVHQWSIPLGDHTAQLAEIAAVEFACKKALKISGPVLIVTDSFYVAESANKELPYWKSNGFLNNKKKPLRHVSKWKSIAECLQLKPDIIIMHEKGHQQPMTTLHTEGNNLADKLATQGSYVVHAGKRTADGSEFEKRTADGSEFESPKKKAKVE

SEQ ID NO: 7704 - protein, 2092 aa, synthetic construct
MPAAKRVKLDGGDKKYSIGLDIGTNSVGWAVITDEYKVPSKKFKVLGNTDRHSIKKNLIGALLFDSGETAEATRLKRTARRRYTRRKNRICYLQEIFSNEMAKVDDSFFHRLEESFLVEEDKKHERHPIFGNIVDEVAYHEKYPTIYHLRKKLVDSTDKADLRLIYLALAHMIKFRGHFLIEGDLNPDNSDVDKLFIQLVQTYNQLFEENPINASGVDAKAILSARLSKSRRLENLIAQLPGEKKNGLFGNLIALSLGLTPNFKSNFDLAEDAKLQLSKDTYDDDLDNLLAQIGDQYADLFLAAKNLSDAILLSDILRVNTEITKAPLSASMIKRYDEHHQDLTLLKALVRQQLPEKYKEIFFDQSKNGYAGYIDGGASQEEFYKFIKPILEKMDGTEELLVKLNREDLLRKQRTFDNGSIPHQIHLGELHAILRRQEDFYPFLKDNREKIEKILTFRIPYYVGPLARGNSRFAWMTRKSEETITPWNFEEVVDKGASAQSFIERMTNFDKNLPNEKVLPKHSLLYEYFTVYNELTKVKYVTEGMRKPAFLSGEQKKAIVDLLFKTNRKVTVKQLKEDYFKKIECFDSVEISGVEDRFNASLGTYHDLLKIIKDKDFLDNEENEDILEDIVLTLTLFEDREMIEERLKTYAHLFDDKVMKQLKRRRYTGWGRLSRKLINGIRDKQSGKTILDFLKSDGFANRNFMQLIHDDSLTFKEDIQKAQVSGQGDSLHEHIANLAGSPAIKKGILQTVKVVDELVKVMGRHKPENIVIEMARENQTTQKGQKNSRERMKRIEEGIKELGSQILKEHPVENTQLQNEKLYLYYLQNGRDMYVDQELDINRLSDYDVDHIVPQSFLKDDSIDNKVLTRSDKARGKSDNVPSEEVVKKMKNYWRQLLNAKLITQRKFDNLTKAERGGLSELDKAGFIKRQLVETRQITKHVAQILDSRMNTKYDENDKLIREVKVITLKSKLVSDFRKDFQFYKVREINNYHHAHDAYLNAVVGTALIKKYPKLESEFVYGDYKVYDVRKMIAKSEQEIGKATAKYFFYSNIMNFFKTEITLANGEIRKRPLIETNGETGEIVWDKGRDFATVRKVLSMPQVNIVKKTEVQTGGFSKESILPKRNSDKLIARKKDWDPKKYGGFDSPTVAYSVLVVAKVEKGKSKKLKSVKELLGITIMERSSFEKNPIDFLEAKGYKEVKKDLIIKLPKYSLFELENGRKRMLASAGELQKGNELALPSKYVNFLYLASHYEKLKGSPEDNEQKQLFVEQHKHYLDEIIEQISEFSKRVILADANLDKVLSAYNKHRDKPIREQAENIIHLFTLTNLGAPAAFKYFDTTIDRKRYTSTKEVLDATLIHQSITGLYETRIDLSQLGGDGGSGSETPGTSESATPESGGIPWLMKKPLQLTTLVPLQEYEERLLKQTMLTGSYKEKLQSLFLKYDALWQHWENQVGHRRIKPHHIATGTVNPRPQKQYPINPKAKASIQTVINDLLKQGVLIQQNSIMNTPVYPVPKPDGKWRMVLDYREVNKTIPLIAAQNQHSAGILSSIFRGKYKTTLDLSNGFWAHSITPESYWLTAFTWLGQQYCWTRLPQGFLNSPALFTADVVDLLKEVPNVQVYVDDIYISHDDPREHLEQLEKVFSLLLNAGYVVSLKKSEIAQHEVEFLGFNITKEGRGLTETFKQKLLNITPPRDLKQLQSILGLLNFARNFIPNFSELVKPLYNIIATANGKYITWTTDNSQQLQNIISMLNSAENLEERNPEVRLIMKVNTSPSAGYIRFYNEFAKRPIMYLNYVYTKAEVKFTNTEKLLTTIHKGLIKALDLGMGQEILVYSPIVSMTKIQKTPLPERKALPIRWITWMSYLEDPRIQFHYDKTLPELQQVPTVTDDIIAKIKHPSEFSMVFYTDGSAIKHPNVNKSHNAGMGIAQVQFKPEFTVINTWSIPLGDHTAQLAEVAAVEFACKKALKIDGPVLIVTDSFYVAESVNKELPYWQSNGFFNNKKKPLKHVSKWKSIADCIQLKPDIIIIHEKGHQPTASTFHTEGNNLADKLATQGSYVVNAGKRTADGSEFEKRTADGSEFESPKKKAKVE

SEQ ID NO: 7705 - protein, 2181 aa, synthetic construct
MPAAKRVKLDGGDKKYSIGLDIGTNSVGWAVITDEYKVPSKKFKVLGNTDRHSIKKNLIGALLFDSGETAEATRLKRTARRRYTRRKNRICYLQEIFSNEMAKVDDSFFHRLEESFLVEEDKKHERHPIFGNIVDEVAYHEKYPTIYHLRKKLVDSTDKADLRLIYLALAHMIKFRGHFLIEGDLNPDNSDVDKLFIQLVQTYNQLFEENPINASGVDAKAILSARLSKSRRLENLIAQLPGEKKNGLFGNLIALSLGLTPNFKSNFDLAEDAKLQLSKDTYDDDLDNLLAQIGDQYADLFLAAKNLSDAILLSDILRVNTEITKAPLSASMIKRYDEHHQDLTLLKALVRQQLPEKYKEIFFDQSKNGYAGYIDGGASQEEFYKFIKPILEKMDGTEELLVKLNREDLLRKQRTFDNGSIPHQIHLGELHAILRRQEDFYPFLKDNREKIEKILTFRIPYYVGPLARGNSRFAWMTRKSEETITPWNFEEVVDKGASAQSFIERMTNFDKNLPNEKVLPKHSLLYEYFTVYNELTKVKYVTEGMRKPAFLSGEQKKAIVDLLFKTNRKVTVKQLKEDYFKKIECFDSVEISGVEDRFNASLGTYHDLLKIIKDKDFLDNEENEDILEDIVLTLTLFEDREMIEERLKTYAHLFDDKVMKQLKRRRYTGWGRLSRKLINGIRDKQSGKTILDFLKSDGFANRNFMQLIHDDSLTFKEDIQKAQVSGQGDSLHEHIANLAGSPAIKKGILQTVKVVDELVKVMGRHKPENIVIEMARENQTTQKGQKNSRERMKRIEEGIKELGSQILKEHPVENTQLQNEKLYLYYLQNGRDMYVDQELDINRLSDYDVDHIVPQSFLKDDSIDNKVLTRSDKARGKSDNVPSEEVVKKMKNYWRQLLNAKLITQRKFDNLTKAERGGLSELDKAGFIKRQLVETRQITKHVAQILDSRMNTKYDENDKLIREVKVITLKSKLVSDFRKDFQFYKVREINNYHHAHDAYLNAVVGTALIKKYPKLESEFVYGDYKVYDVRKMIAKSEQEIGKATAKYFFYSNIMNFFKTEITLANGEIRKRPLIETNGETGEIVWDKGRDFATVRKVLSMPQVNIVKKTEVQTGGFSKESILPKRNSDKLIARKKDWDPKKYGGFDSPTVAYSVLVVAKVEKGKSKKLKSVKELLGITIMERSSFEKNPIDFLEAKGYKEVKKDLIIKLPKYSLFELENGRKRMLASAGELQKGNELALPSKYVNFLYLASHYEKLKGSPEDNEQKQLFVEQHKHYLDEIIEQISEFSKRVILADANLDKVLSAYNKHRDKPIREQAENIIHLFTLTNLGAPAAFKYFDTTIDRKRYTSTKEVLDATLIHQSITGLYETRIDLSQLGGDGGSGSETPGTSESATPESGGMDPLQLLQPLEAEIKGTKLKAHWNSGATITCVPQAFLEEEVPIKNIWIKTIHGEKEQPVYYLTFKIQGRKVEAEVISSPYDYILVSPSDIPWLMKKPLQLTTLVPLQEYEERLLKQTMLTGSYKEKLQSLFLKYDALWQHWENQVGHRRIKPHHIATGTVNPRPQKQYPINPKAKASIQTVINDLLKQGVLIQQNSIMNTPVYPVPKPDGKWRMVLDYREVNKTIPLIAAQNQHSAGILSSIFRGKYKTTLDLSNGFWAHSITPESYWLTAFTWLGQQYCWTRLPQGFLNSPALFNADVVDLLKEVPNVQVYVDDIYISHDDPREHLEQLEKVFSLLLNAGYVVSLKKSEIAQHEVEFLGFNITKEGRGLTETFKQKLLNITPPRDLKQLQSILGLLNFARNFIPNFSELVKPLYNIIATAPGKYITWTTDNSQQLQNIISMLNSAENLEERNPEVRLIMKVNTSPSAGYIRFYNEFAKRPIMYLNYVYTKAEVKFTNTEKLLTTIHKGLIKALDLGMGQEILVYSPIVSMTKIQKTPLPERKALPIRWITWMSYLEDPRIQFHYDKTLPELQQVPTVTDDIIAKIKHPSEFSMVFYTDGSAIKHPNVNKSHNAGMGIAQVQFKPEFTVINTWSIPLGDHTAQLAEVAAVEFACKKALKIDGPVLIVTDSFYVAESVNKELPYWQSNGFFNNKKKPLKHVSKWKSIADCIQLKPDIIIIHEKGHQPTASTFHTEGNNLADKLATQGSYVVNAGKRTADGSEFEKRTADGSEFESPKKKAKVE

SEQ ID NO: 7706 - protein, 2101 aa, synthetic construct
MPAAKRVKLDGGDKKYSIGLDIGTNSVGWAVITDEYKVPSKKFKVLGNTDRHSIKKNLIGALLFDSGETAEATRLKRTARRRYTRRKNRICYLQEIFSNEMAKVDDSFFHRLEESFLVEEDKKHERHPIFGNIVDEVAYHEKYPTIYHLRKKLVDSTDKADLRLIYLALAHMIKFRGHFLIEGDLNPDNSDVDKLFIQLVQTYNQLFEENPINASGVDAKAILSARLSKSRRLENLIAQLPGEKKNGLFGNLIALSLGLTPNFKSNFDLAEDAKLQLSKDTYDDDLDNLLAQIGDQYADLFLAAKNLSDAILLSDILRVNTEITKAPLSASMIKRYDEHHQDLTLLKALVRQQLPEKYKEIFFDQSKNGYAGYIDGGASQEEFYKFIKPILEKMDGTEELLVKLNREDLLRKQRTFDNGSIPHQIHLGELHAILRRQEDFYPFLKDNREKIEKILTFRIPYYVGPLARGNSRFAWMTRKSEETITPWNFEEVVDKGASAQSFIERMTNFDKNLPNEKVLPKHSLLYEYFTVYNELTKVKYVTEGMRKPAFLSGEQKKAIVDLLFKTNRKVTVKQLKEDYFKKIECFDSVEISGVEDRFNASLGTYHDLLKIIKDKDFLDNEENEDILEDIVLTLTLFEDREMIEERLKTYAHLFDDKVMKQLKRRRYTGWGRLSRKLINGIRDKQSGKTILDFLKSDGFANRNFMQLIHDDSLTFKEDIQKAQVSGQGDSLHEHIANLAGSPAIKKGILQTVKVVDELVKVMGRHKPENIVIEMARENQTTQKGQKNSRERMKRIEEGIKELGSQILKEHPVENTQLQNEKLYLYYLQNGRDMYVDQELDINRLSDYDVDHIVPQSFLKDDSIDNKVLTRSDKARGKSDNVPSEEVVKKMKNYWRQLLNAKLITQRKFDNLTKAERGGLSELDKAGFIKRQLVETRQITKHVAQILDSRMNTKYDENDKLIREVKVITLKSKLVSDFRKDFQFYKVREINNYHHAHDAYLNAVVGTALIKKYPKLESEFVYGDYKVYDVRKMIAKSEQEIGKATAKYFFYSNIMNFFKTEITLANGEIRKRPLIETNGETGEIVWDKGRDFATVRKVLSMPQVNIVKKTEVQTGGFSKESILPKRNSDKLIARKKDWDPKKYGGFDSPTVAYSVLVVAKVEKGKSKKLKSVKELLGITIMERSSFEKNPIDFLEAKGYKEVKKDLIIKLPKYSLFELENGRKRMLASAGELQKGNELALPSKYVNFLYLASHYEKLKGSPEDNEQKQLFVEQHKHYLDEIIEQISEFSKRVILADANLDKVLSAYNKHRDKPIREQAENIIHLFTLTNLGAPAAFKYFDTTIDRKRYTSTKEVLDATLIHQSITGLYETRIDLSQLGGDGGSGSETPGTSESATPESGGTLNIEDEYRLHETSKEPDVPLGSTWLSDFPQAWAETGGMGLAVRQAPLIIPLKATSTPVSIKQYPMSQEARLGIKPHIQRLLDQGILVPCQSPWNTPLLPVKKPGTNDYRPVQDLREVNKRVEDIHPTVPNPYNLLSGLPPSHQWYTVLDLKDAFFCLRLHPTSQPLFAFEWRDPEMGISGQLTWTRLPQGFKNSPTLFNEALHRDLADFRIQHPDLILLQYVDDLLLAATSEQDCQRGTRALLQTLGNLGYRASAKKAQICQKQVKYLGYLLKEGQRWLTEARKETVMGQPTPKTPRQLREFLGTAGFCRLWIPGFAEMAAPLYPLTKPGTLFNWGPDQQKAYQEIKQALLTAPALGLPDLTKPFELFVDEKQGYAKGVLTQKLGPWRRPVAYLSKKLDPVAAGWPPCLRMVAAIAVLTKDAGKLTMGQPLVILAPHAVEALVKQPPDRWLSNARMTHYQAMLLDTDRVQFGPVVALNPATLLPLPEKEAPHDCLEILAETHGTRPDLTDQPIPDADYTWYTDGSSFLQEGQRRAGAAVTTETEVIWARALPAGTSAQRAELIALTQALKMAEGKKLNVYTDSRYAFATAHVHGEIYRRRGWLTSEGREIKNKNEILALLKALFLPKRLSIIHCPGHQKGNSAEARGNRMADQAAREAAMKAVLETSTLLAGKRTADGSEFEKRTADGSEFESPKKKAKVE

SEQ ID NO: 7707 - protein, 2099 aa, synthetic construct
MPAAKRVKLDGGDKKYSIGLDIGTNSVGWAVITDEYKVPSKKFKVLGNTDRHSIKKNLIGALLFDSGETAEATRLKRTARRRYTRRKNRICYLQEIFSNEMAKVDDSFFHRLEESFLVEEDKKHERHPIFGNIVDEVAYHEKYPTIYHLRKKLVDSTDKADLRLIYLALAHMIKFRGHFLIEGDLNPDNSDVDKLFIQLVQTYNQLFEENPINASGVDAKAILSARLSKSRRLENLIAQLPGEKKNGLFGNLIALSLGLTPNFKSNFDLAEDAKLQLSKDTYDDDLDNLLAQIGDQYADLFLAAKNLSDAILLSDILRVNTEITKAPLSASMIKRYDEHHQDLTLLKALVRQQLPEKYKEIFFDQSKNGYAGYIDGGASQEEFYKFIKPILEKMDGTEELLVKLNREDLLRKQRTFDNGSIPHQIHLGELHAILRRQEDFYPFLKDNREKIEKILTFRIPYYVGPLARGNSRFAWMTRKSEETITPWNFEEVVDKGASAQSFIERMTNFDKNLPNEKVLPKHSLLYEYFTVYNELTKVKYVTEGMRKPAFLSGEQKKAIVDLLFKTNRKVTVKQLKEDYFKKIECFDSVEISGVEDRFNASLGTYHDLLKIIKDKDFLDNEENEDILEDIVLTLTLFEDREMIEERLKTYAHLFDDKVMKQLKRRRYTGWGRLSRKLINGIRDKQSGKTILDFLKSDGFANRNFMQLIHDDSLTFKEDIQKAQVSGQGDSLHEHIANLAGSPAIKKGILQTVKVVDELVKVMGRHKPENIVIEMARENQTTQKGQKNSRERMKRIEEGIKELGSQILKEHPVENTQLQNEKLYLYYLQNGRDMYVDQELDINRLSDYDVDHIVPQSFLKDDSIDNKVLTRSDKARGKSDNVPSEEVVKKMKNYWRQLLNAKLITQRKFDNLTKAERGGLSELDKAGFIKRQLVETRQITKHVAQILDSRMNTKYDENDKLIREVKVITLKSKLVSDFRKDFQFYKVREINNYHHAHDAYLNAVVGTALIKKYPKLESEFVYGDYKVYDVRKMIAKSEQEIGKATAKYFFYSNIMNFFKTEITLANGEIRKRPLIETNGETGEIVWDKGRDFATVRKVLSMPQVNIVKKTEVQTGGFSKESILPKRNSDKLIARKKDWDPKKYGGFDSPTVAYSVLVVAKVEKGKSKKLKSVKELLGITIMERSSFEKNPIDFLEAKGYKEVKKDLIIKLPKYSLFELENGRKRMLASAGELQKGNELALPSKYVNFLYLASHYEKLKGSPEDNEQKQLFVEQHKHYLDEIIEQISEFSKRVILADANLDKVLSAYNKHRDKPIREQAENIIHLFTLTNLGAPAAFKYFDTTIDRKRYTSTKEVLDATLIHQSITGLYETRIDLSQLGGDGGGSAGSAAGSGEFGGTAPLEEEYRLFLEAPIQNVTLLEQWKREIPKVWAEINPPGLASTQAPIHVQLLSTALPVRVRQYPITLEAKRSLRETIRKFRAAGILRPVHSPWNTPLLPVRKSGTSEYRMVQDLREVNKRVETIHPTVPNPYTLLSLLPPDRIWYSVLDLKDAFFCIPLAPESQLIFAFEWADAEEGESGQLTWTRLPQGFKNSPTLFNEALNRDLQGFRLDHPSVSLLQYVDDLLIAADTQAACLSATRDLLMTLAELGYRVSGKKAQLCQEEVTYLGFKIHKGSRSLSNSRTQAILQIPVPKTKRQVREFLGTIGYCRLWIPGFAELAQPLYAATRPGNDPLVWGEKEEEAFQSLKLALTQPPALALPSLDKPFQLFVEETSGAAKGVLTQALGPWKRPVAYLSKRLDPVAAGWPRCLRAIAAAALLTREASKLTFGQDIEITSSHNLESLLRSPPDKWLTNARITQYQVLLLDPPRVRFKQTAALNPATLLPETDDTLPIHHCLDTLDSLTSTRPDLTDQPLAQAEATLFTDGSSYIRDGKRYAGAAVVTLDSVIWAEPLPIGTSAQKAELIALTKALEWSKDKSVNIYTDSRYAFATLHVHGMIYRERGWLTAGGKAIKNAPEILALLTAVWLPKRVAVMHCKGHQKDDAPTSTGNRRADEVAREVAIRPLSTQATISAGKRTADGSEFEKRTADGSEFESPKKKAKVE

SEQ ID NO: 7708 - protein, 2002 aa, synthetic construct
MPAAKRVKLDGGDKKYSIGLDIGTNSVGWAVITDEYKVPSKKFKVLGNTDRHSIKKNLIGALLFDSGETAEATRLKRTARRRYTRRKNRICYLQEIFSNEMAKVDDSFFHRLEESFLVEEDKKHERHPIFGNIVDEVAYHEKYPTIYHLRKKLVDSTDKADLRLIYLALAHMIKFRGHFLIEGDLNPDNSDVDKLFIQLVQTYNQLFEENPINASGVDAKAILSARLSKSRRLENLIAQLPGEKKNGLFGNLIALSLGLTPNFKSNFDLAEDAKLQLSKDTYDDDLDNLLAQIGDQYADLFLAAKNLSDAILLSDILRVNTEITKAPLSASMIKRYDEHHQDLTLLKALVRQQLPEKYKEIFFDQSKNGYAGYIDGGASQEEFYKFIKPILEKMDGTEELLVKLNREDLLRKQRTFDNGSIPHQIHLGELHAILRRQEDFYPFLKDNREKIEKILTFRIPYYVGPLARGNSRFAWMTRKSEETITPWNFEEVVDKGASAQSFIERMTNFDKNLPNEKVLPKHSLLYEYFTVYNELTKVKYVTEGMRKPAFLSGEQKKAIVDLLFKTNRKVTVKQLKEDYFKKIECFDSVEISGVEDRFNASLGTYHDLLKIIKDKDFLDNEENEDILEDIVLTLTLFEDREMIEERLKTYAHLFDDKVMKQLKRRRYTGWGRLSRKLINGIRDKQSGKTILDFLKSDGFANRNFMQLIHDDSLTFKEDIQKAQVSGQGDSLHEHIANLAGSPAIKKGILQTVKVVDELVKVMGRHKPENIVIEMARENQTTQKGQKNSRERMKRIEEGIKELGSQILKEHPVENTQLQNEKLYLYYLQNGRDMYVDQELDINRLSDYDVDHIVPQSFLKDDSIDNKVLTRSDKARGKSDNVPSEEVVKKMKNYWRQLLNAKLITQRKFDNLTKAERGGLSELDKAGFIKRQLVETRQITKHVAQILDSRMNTKYDENDKLIREVKVITLKSKLVSDFRKDFQFYKVREINNYHHAHDAYLNAVVGTALIKKYPKLESEFVYGDYKVYDVRKMIAKSEQEIGKATAKYFFYSNIMNFFKTEITLANGEIRKRPLIETNGETGEIVWDKGRDFATVRKVLSMPQVNIVKKTEVQTGGFSKESILPKRNSDKLIARKKDWDPKKYGGFDSPTVAYSVLVVAKVEKGKSKKLKSVKELLGITIMERSSFEKNPIDFLEAKGYKEVKKDLIIKLPKYSLFELENGRKRMLASAGELQKGNELALPSKYVNFLYLASHYEKLKGSPEDNEQKQLFVEQHKHYLDEIIEQISEFSKRVILADANLDKVLSAYNKHRDKPIREQAENIIHLFTLTNLGAPAAFKYFDTTIDRKRYTSTKEVLDATLIHQSITGLYETRIDLSQLGGDGGGSAGSAAGSGEFGGGVLDTPPSHIGLEHLPPPPEVPQFPLNLERLQALQDLVHRSLEAGYISPWDGPGNNPVFPVRKPNGAWRFVHDLRATNALTKPIPALSPGPPDLTAPPTHPPHIICLDLKDAFFQIPVEDRFRFYLSFTLPSPGGLQPHRRFAWRVLPQGFINSPALFQRALQEPLRQVSAAFSQSLLVSYMDDILYASPTEEQRSQCYQALAARLRDLGFQVASEKTSQTPSPVPFLGQMVHEQIVTYQSLPTLQISSPISLHQLQAVLGDLQWVSRGTPTTRRPLQLLYSSLKRHHDPRAIIQLSPEQLQGIAELRQALSHNARSRYNEQEPLLAYVHLTRAGSTLVLFQKGAQFPLAYFQTPLTDNQASPWGLLLLLGCQYLQTQALSSYAKPILKYYHNLPKTSLDNWIQSSEDPRVQELLQLWPQISSQGIQPPGPWKTLITRAEVFLTPQFSPDPIPAALCLFSDGATGRGAYCLWKDHLLDFQAVPAPESAQKGELAGLLAGLAAAPPEPVNIWVDSKYLYSLLRTWVLGAWLQPDPVPSYALLYKSLLRHPAIVVGHVRSHSSASHPIASLNNYVDQLAGKRTADGSEFEKRTADGSEFESPKKKAKVE

SEQ ID NO: 7709 - protein, 2088 aa, synthetic construct
MPAAKRVKLDGGDKKYSIGLDIGTNSVGWAVITDEYKVPSKKFKVLGNTDRHSIKKNLIGALLFDSGETAEATRLKRTARRRYTRRKNRICYLQEIFSNEMAKVDDSFFHRLEESFLVEEDKKHERHPIFGNIVDEVAYHEKYPTIYHLRKKLVDSTDKADLRLIYLALAHMIKFRGHFLIEGDLNPDNSDVDKLFIQLVQTYNQLFEENPINASGVDAKAILSARLSKSRRLENLIAQLPGEKKNGLFGNLIALSLGLTPNFKSNFDLAEDAKLQLSKDTYDDDLDNLLAQIGDQYADLFLAAKNLSDAILLSDILRVNTEITKAPLSASMIKRYDEHHQDLTLLKALVRQQLPEKYKEIFFDQSKNGYAGYIDGGASQEEFYKFIKPILEKMDGTEELLVKLNREDLLRKQRTFDNGSIPHQIHLGELHAILRRQEDFYPFLKDNREKIEKILTFRIPYYVGPLARGNSRFAWMTRKSEETITPWNFEEVVDKGASAQSFIERMTNFDKNLPNEKVLPKHSLLYEYFTVYNELTKVKYVTEGMRKPAFLSGEQKKAIVDLLFKTNRKVTVKQLKEDYFKKIECFDSVEISGVEDRFNASLGTYHDLLKIIKDKDFLDNEENEDILEDIVLTLTLFEDREMIEERLKTYAHLFDDKVMKQLKRRRYTGWGRLSRKLINGIRDKQSGKTILDFLKSDGFANRNFMQLIHDDSLTFKEDIQKAQVSGQGDSLHEHIANLAGSPAIKKGILQTVKVVDELVKVMGRHKPENIVIEMARENQTTQKGQKNSRERMKRIEEGIKELGSQILKEHPVENTQLQNEKLYLYYLQNGRDMYVDQELDINRLSDYDVDHIVPQSFLKDDSIDNKVLTRSDKARGKSDNVPSEEVVKKMKNYWRQLLNAKLITQRKFDNLTKAERGGLSELDKAGFIKRQLVETRQITKHVAQILDSRMNTKYDENDKLIREVKVITLKSKLVSDFRKDFQFYKVREINNYHHAHDAYLNAVVGTALIKKYPKLESEFVYGDYKVYDVRKMIAKSEQEIGKATAKYFFYSNIMNFFKTEITLANGEIRKRPLIETNGETGEIVWDKGRDFATVRKVLSMPQVNIVKKTEVQTGGFSKESILPKRNSDKLIARKKDWDPKKYGGFDSPTVAYSVLVVAKVEKGKSKKLKSVKELLGITIMERSSFEKNPIDFLEAKGYKEVKKDLIIKLPKYSLFELENGRKRMLASAGELQKGNELALPSKYVNFLYLASHYEKLKGSPEDNEQKQLFVEQHKHYLDEIIEQISEFSKRVILADANLDKVLSAYNKHRDKPIREQAENIIHLFTLTNLGAPAAFKYFDTTIDRKRYTSTKEVLDATLIHQSITGLYETRIDLSQLGGDGGGSAGSAAGSGEFGGVPWILKKPLELTIKLDLEEQQGTLLNNSILSKKGKEELKQLFEKYSALWQSWENQVGHRRIRPHKIATGTVKPTPQKQYHINPKAKPDIQIVINDLLKQGVLIQKESTMNTPVYPVPKPNGRWRMVLDYRAVNKVTPLIAVQNQHSYGILGSLFKGRYKTTIDLSNGFWAHPIVPEDYWITAFTWQGKQYCWTVLPQGFLNSPGLFTGDVVDLLQGIPNVEVYVDDVYISHDSEKEHLEYLDILFNRLKEAGYIISLKKSNIANSIVDFLGFQITNEGRGLTDTFKEKLENITAPTTLKQLQSILGLLNFARNFIPDFTELIAPLYALIPKSTKNYVPWQIEHSTTLETLITKLNGAEYLQGRKGDKTLIMKVNASYTTGYIRYYNEGEKKPISYVSIVFSKTELKFTELEKLLTTVHKGLLKALDLSMGQNIHVYSPIVSMQNIQKTPQTAKKALASRWLSWLSYLEDPRIRFFYDPQMPALKDLPAVDTGKDNKKHPSNFQHIFYTDGSAITSPTKEGHLNAGMGIVYFINKDGNLQKQQEWSISLGNHTAQFAEIAAFEFALKKCLPLGGNILVVTDSNYVAKAYNEELDVWASNGFVNNRKKPLKHISKWKSVADLKRLRPDVVVTHEPGHQKLDSSPHAYGNNLADQLATQASFKVHAGKRTADGSEFEKRTADGSEFESPKKKAKVE

SEQ ID NO: 7710 - protein, 2088 aa, synthetic construct
MPAAKRVKLDGGDKKYSIGLDIGTNSVGWAVITDEYKVPSKKFKVLGNTDRHSIKKNLIGALLFDSGETAEATRLKRTARRRYTRRKNRICYLQEIFSNEMAKVDDSFFHRLEESFLVEEDKKHERHPIFGNIVDEVAYHEKYPTIYHLRKKLVDSTDKADLRLIYLALAHMIKFRGHFLIEGDLNPDNSDVDKLFIQLVQTYNQLFEENPINASGVDAKAILSARLSKSRRLENLIAQLPGEKKNGLFGNLIALSLGLTPNFKSNFDLAEDAKLQLSKDTYDDDLDNLLAQIGDQYADLFLAAKNLSDAILLSDILRVNTEITKAPLSASMIKRYDEHHQDLTLLKALVRQQLPEKYKEIFFDQSKNGYAGYIDGGASQEEFYKFIKPILEKMDGTEELLVKLNREDLLRKQRTFDNGSIPHQIHLGELHAILRRQEDFYPFLKDNREKIEKILTFRIPYYVGPLARGNSRFAWMTRKSEETITPWNFEEVVDKGASAQSFIERMTNFDKNLPNEKVLPKHSLLYEYFTVYNELTKVKYVTEGMRKPAFLSGEQKKAIVDLLFKTNRKVTVKQLKEDYFKKIECFDSVEISGVEDRFNASLGTYHDLLKIIKDKDFLDNEENEDILEDIVLTLTLFEDREMIEERLKTYAHLFDDKVMKQLKRRRYTGWGRLSRKLINGIRDKQSGKTILDFLKSDGFANRNFMQLIHDDSLTFKEDIQKAQVSGQGDSLHEHIANLAGSPAIKKGILQTVKVVDELVKVMGRHKPENIVIEMARENQTTQKGQKNSRERMKRIEEGIKELGSQILKEHPVENTQLQNEKLYLYYLQNGRDMYVDQELDINRLSDYDVDHIVPQSFLKDDSIDNKVLTRSDKARGKSDNVPSEEVVKKMKNYWRQLLNAKLITQRKFDNLTKAERGGLSELDKAGFIKRQLVETRQITKHVAQILDSRMNTKYDENDKLIREVKVITLKSKLVSDFRKDFQFYKVREINNYHHAHDAYLNAVVGTALIKKYPKLESEFVYGDYKVYDVRKMIAKSEQEIGKATAKYFFYSNIMNFFKTEITLANGEIRKRPLIETNGETGEIVWDKGRDFATVRKVLSMPQVNIVKKTEVQTGGFSKESILPKRNSDKLIARKKDWDPKKYGGFDSPTVAYSVLVVAKVEKGKSKKLKSVKELLGITIMERSSFEKNPIDFLEAKGYKEVKKDLIIKLPKYSLFELENGRKRMLASAGELQKGNELALPSKYVNFLYLASHYEKLKGSPEDNEQKQLFVEQHKHYLDEIIEQISEFSKRVILADANLDKVLSAYNKHRDKPIREQAENIIHLFTLTNLGAPAAFKYFDTTIDRKRYTSTKEVLDATLIHQSITGLYETRIDLSQLGGDGGGSAGSAAGSGEFGGVPWILKKPLELTIKLDLEEQQGTLLNNSILSKKGKEELKQLFEKYSALWQSWENQVGHRRIRPHKIATGTVKPTPQKQYHINPKAKPDIQIVINDLLKQGVLIQKESTMNTPVYPVPKPNGRWRMVLDYRAVNKVTPLIAVQNQHSYGILGSLFKGRYKTTIDLSNGFWAHPIVPEDYWITAFTWQGKQYCWTVLPQGFLNSPGLFNGDVVDLLQGIPNVEVYVDDVYISHDSEKEHLEYLDILFNRLKEAGYIISLKKSNIANSIVDFLGFQITNEGRGLTDTFKEKLENITAPTTLKQLQSILGLLNFARNFIPDFTELIAPLYALIPKSPKNYVPWQIEHSTTLETLITKLNGAEYLQGRKGDKTLIMKVNASYTTGYIRYYNEGEKKPISYVSIVFSKTELKFTELEKLLTTVHKGLLKALDLSMGQNIHVYSPIVSMQNIQKTPQTAKKALASRWLSWLSYLEDPRIRFFYDPQMPALKDLPAVDTGKDNKKHPSNFQHIFYTDGSAITSPTKEGHLNAGMGIVYFINKDGNLQKQQEWSISLGNHTAQFAEIAAFEFALKKCLPLGGNILVVTDSNYVAKAYNEELDVWASNGFVNNRKKPLKHISKWKSVADLKRLRPDVVVTHEPGHQKLDSSPHAYGNNLADQLATQASFKVHAGKRTADGSEFEKRTADGSEFESPKKKAKVE

SEQ ID NO: 7711 - protein, 2096 aa, synthetic construct
MPAAKRVKLDGGDKKYSIGLDIGTNSVGWAVITDEYKVPSKKFKVLGNTDRHSIKKNLIGALLFDSGETAEATRLKRTARRRYTRRKNRICYLQEIFSNEMAKVDDSFFHRLEESFLVEEDKKHERHPIFGNIVDEVAYHEKYPTIYHLRKKLVDSTDKADLRLIYLALAHMIKFRGHFLIEGDLNPDNSDVDKLFIQLVQTYNQLFEENPINASGVDAKAILSARLSKSRRLENLIAQLPGEKKNGLFGNLIALSLGLTPNFKSNFDLAEDAKLQLSKDTYDDDLDNLLAQIGDQYADLFLAAKNLSDAILLSDILRVNTEITKAPLSASMIKRYDEHHQDLTLLKALVRQQLPEKYKEIFFDQSKNGYAGYIDGGASQEEFYKFIKPILEKMDGTEELLVKLNREDLLRKQRTFDNGSIPHQIHLGELHAILRRQEDFYPFLKDNREKIEKILTFRIPYYVGPLARGNSRFAWMTRKSEETITPWNFEEVVDKGASAQSFIERMTNFDKNLPNEKVLPKHSLLYEYFTVYNELTKVKYVTEGMRKPAFLSGEQKKAIVDLLFKTNRKVTVKQLKEDYFKKIECFDSVEISGVEDRFNASLGTYHDLLKIIKDKDFLDNEENEDILEDIVLTLTLFEDREMIEERLKTYAHLFDDKVMKQLKRRRYTGWGRLSRKLINGIRDKQSGKTILDFLKSDGFANRNFMQLIHDDSLTFKEDIQKAQVSGQGDSLHEHIANLAGSPAIKKGILQTVKVVDELVKVMGRHKPENIVIEMARENQTTQKGQKNSRERMKRIEEGIKELGSQILKEHPVENTQLQNEKLYLYYLQNGRDMYVDQELDINRLSDYDVDHIVPQSFLKDDSIDNKVLTRSDKARGKSDNVPSEEVVKKMKNYWRQLLNAKLITQRKFDNLTKAERGGLSELDKAGFIKRQLVETRQITKHVAQILDSRMNTKYDENDKLIREVKVITLKSKLVSDFRKDFQFYKVREINNYHHAHDAYLNAVVGTALIKKYPKLESEFVYGDYKVYDVRKMIAKSEQEIGKATAKYFFYSNIMNFFKTEITLANGEIRKRPLIETNGETGEIVWDKGRDFATVRKVLSMPQVNIVKKTEVQTGGFSKESILPKRNSDKLIARKKDWDPKKYGGFDSPTVAYSVLVVAKVEKGKSKKLKSVKELLGITIMERSSFEKNPIDFLEAKGYKEVKKDLIIKLPKYSLFELENGRKRMLASAGELQKGNELALPSKYVNFLYLASHYEKLKGSPEDNEQKQLFVEQHKHYLDEIIEQISEFSKRVILADANLDKVLSAYNKHRDKPIREQAENIIHLFTLTNLGAPAAFKYFDTTIDRKRYTSTKEVLDATLIHQSITGLYETRIDLSQLGGDGGGSAGSAAGSGEFGGTLQLEEEYRLFEPESTQKQEMDIWLKNFPQAWAETGGMGTAHCQAPVLIQLKATATPISIRQYPMPHEAYQGIKPHIRRMLDQGILKPCQSPWNTPLLPVKKPGTEDYRPVQDLREVNKRVEDIHPTVPNPYNLLSTLPPSHPWYTVLDLKDAFFCLRLHSESQLLFAFEWRDPEIGLSGQLTWTRLPQGFKNSPTLFNEALHSDLADFRVRYPALVLLQYVDDLLLAAATRTECLEGTKALLETLGNKGYRASAKKAQICLQEVTYLGYSLKDGQRWLTKARKEAILSIPVPKNSRQVREFLGKAGYCRLFIPGFAELAAPLYPLTRPGTLFQWGTEQQLAFEDIKKALLSSPALGLPDITKPFELFIDENSGFAKGVLVQKLGPWKRPVAYLSKKLDTVASGWPPCLRMVAAIAILVKDAGKLTLGQPLTILTSHPVEALVRQPPNKWLSNARMTHYQAMLLDAERVHFGPTVSLNPATLLPLPSGGNHHDCLQILAETHGTRPDLTDQPLPDADLTWYTDGSSFIRNGEREAGAAVTTESEVIWAAPLPPGTSAQRAELIALTQALKMAEGKKLTVYTDSRYAFATTHVHGEIYRRRGWLTSEGKEIKNKNEILALLEALFLPKRLSIIHCPGHQKGDSPQAKGNRLADDTAKKAATETHSSLTVLPAGKRTADGSEFEKRTADGSEFESPKKKAKVE

SEQ ID NO: 7712 - protein, 2095 aa, synthetic construct
MPAAKRVKLDGGDKKYSIGLDIGTNSVGWAVITDEYKVPSKKFKVLGNTDRHSIKKNLIGALLFDSGETAEATRLKRTARRRYTRRKNRICYLQEIFSNEMAKVDDSFFHRLEESFLVEEDKKHERHPIFGNIVDEVAYHEKYPTIYHLRKKLVDSTDKADLRLIYLALAHMIKFRGHFLIEGDLNPDNSDVDKLFIQLVQTYNQLFEENPINASGVDAKAILSARLSKSRRLENLIAQLPGEKKNGLFGNLIALSLGLTPNFKSNFDLAEDAKLQLSKDTYDDDLDNLLAQIGDQYADLFLAAKNLSDAILLSDILRVNTEITKAPLSASMIKRYDEHHQDLTLLKALVRQQLPEKYKEIFFDQSKNGYAGYIDGGASQEEFYKFIKPILEKMDGTEELLVKLNREDLLRKQRTFDNGSIPHQIHLGELHAILRRQEDFYPFLKDNREKIEKILTFRIPYYVGPLARGNSRFAWMTRKSEETITPWNFEEVVDKGASAQSFIERMTNFDKNLPNEKVLPKHSLLYEYFTVYNELTKVKYVTEGMRKPAFLSGEQKKAIVDLLFKTNRKVTVKQLKEDYFKKIECFDSVEISGVEDRFNASLGTYHDLLKIIKDKDFLDNEENEDILEDIVLTLTLFEDREMIEERLKTYAHLFDDKVMKQLKRRRYTGWGRLSRKLINGIRDKQSGKTILDFLKSDGFANRNFMQLIHDDSLTFKEDIQKAQVSGQGDSLHEHIANLAGSPAIKKGILQTVKVVDELVKVMGRHKPENIVIEMARENQTTQKGQKNSRERMKRIEEGIKELGSQILKEHPVENTQLQNEKLYLYYLQNGRDMYVDQELDINRLSDYDVDHIVPQSFLKDDSIDNKVLTRSDKARGKSDNVPSEEVVKKMKNYWRQLLNAKLITQRKFDNLTKAERGGLSELDKAGFIKRQLVETRQITKHVAQILDSRMNTKYDENDKLIREVKVITLKSKLVSDFRKDFQFYKVREINNYHHAHDAYLNAVVGTALIKKYPKLESEFVYGDYKVYDVRKMIAKSEQEIGKATAKYFFYSNIMNFFKTEITLANGEIRKRPLIETNGETGEIVWDKGRDFATVRKVLSMPQVNIVKKTEVQTGGFSKESILPKRNSDKLIARKKDWDPKKYGGFDSPTVAYSVLVVAKVEKGKSKKLKSVKELLGITIMERSSFEKNPIDFLEAKGYKEVKKDLIIKLPKYSLFELENGRKRMLASAGELQKGNELALPSKYVNFLYLASHYEKLKGSPEDNEQKQLFVEQHKHYLDEIIEQISEFSKRVILADANLDKVLSAYNKHRDKPIREQAENIIHLFTLTNLGAPAAFKYFDTTIDRKRYTSTKEVLDATLIHQSITGLYETRIDLSQLGGDGGGSAGSAAGSGEFGGVLNLEEEYRLHEKPVPSSIDPSWLQLFPTVWAERAGMGLANQVPPVVVELRSGASPVAVRQYPMSKEAREGIRPHIQKFLDLGVLVPCRSPWNTPLLPVKKPGTNDYRPVQDLREINKRVQDIHPTVPNPYNLLSSLPPSYTWYSVLDLKDAFFCLRLHPNSQPLFAFEWKDPEKGNTGQLTWTRLPQGFKNSPTLFNEALHRDLAPFRALNPQVVLLQYVDDLLVAAPTYEDCKKGTQKLLQELSKLGYRVSAKKAQLCQREVTYLGYLLKEGKRWLTPARKATVMKIPVPTTPRQVREFLGKAGFCRLFIPGFASLAAPLYPLTKPSIPFIWTEEHQQAFDHIKKALLSAPALALPDLTKPFTLYIDERAGVARGVLTQTLGPWRRPVAYLSKKLDPVASGWPTCLKAVAAVALLLKDADKLTLGQNVTVIASHSLESIVRQPPDRWMTNARMTHYQSLLLNERVSFAPPAVLNPATLLPVESEATPVHRCSEILAEETGTRRDLEDQPLPGVPTWYTDGSSFITEGKRRAGAPIVDGKRTVWASSLPEGTSAQKAELVALTQALRLAEGKNINIYTDSRYAFATAHIHGAIYKQRGWLTSAGKDIKNKEEILALLEAIHLPRRVAIIHCPGHQRGSNPVATGNRRADEAAKQAALSTRVLAGTTKPAGKRTADGSEFEKRTADGSEFESPKKKAKVE

SEQ ID NO: 7713 - protein, 2219 aa, synthetic construct
MPAAKRVKLDGGDKKYSIGLDIGTNSVGWAVITDEYKVPSKKFKVLGNTDRHSIKKNLIGALLFDSGETAEATRLKRTARRRYTRRKNRICYLQEIFSNEMAKVDDSFFHRLEESFLVEEDKKHERHPIFGNIVDEVAYHEKYPTIYHLRKKLVDSTDKADLRLIYLALAHMIKFRGHFLIEGDLNPDNSDVDKLFIQLVQTYNQLFEENPINASGVDAKAILSARLSKSRRLENLIAQLPGEKKNGLFGNLIALSLGLTPNFKSNFDLAEDAKLQLSKDTYDDDLDNLLAQIGDQYADLFLAAKNLSDAILLSDILRVNTEITKAPLSASMIKRYDEHHQDLTLLKALVRQQLPEKYKEIFFDQSKNGYAGYIDGGASQEEFYKFIKPILEKMDGTEELLVKLNREDLLRKQRTFDNGSIPHQIHLGELHAILRRQEDFYPFLKDNREKIEKILTFRIPYYVGPLARGNSRFAWMTRKSEETITPWNFEEVVDKGASAQSFIERMTNFDKNLPNEKVLPKHSLLYEYFTVYNELTKVKYVTEGMRKPAFLSGEQKKAIVDLLFKTNRKVTVKQLKEDYFKKIECFDSVEISGVEDRFNASLGTYHDLLKIIKDKDFLDNEENEDILEDIVLTLTLFEDREMIEERLKTYAHLFDDKVMKQLKRRRYTGWGRLSRKLINGIRDKQSGKTILDFLKSDGFANRNFMQLIHDDSLTFKEDIQKAQVSGQGDSLHEHIANLAGSPAIKKGILQTVKVVDELVKVMGRHKPENIVIEMARENQTTQKGQKNSRERMKRIEEGIKELGSQILKEHPVENTQLQNEKLYLYYLQNGRDMYVDQELDINRLSDYDVDHIVPQSFLKDDSIDNKVLTRSDKARGKSDNVPSEEVVKKMKNYWRQLLNAKLITQRKFDNLTKAERGGLSELDKAGFIKRQLVETRQITKHVAQILDSRMNTKYDENDKLIREVKVITLKSKLVSDFRKDFQFYKVREINNYHHAHDAYLNAVVGTALIKKYPKLESEFVYGDYKVYDVRKMIAKSEQEIGKATAKYFFYSNIMNFFKTEITLANGEIRKRPLIETNGETGEIVWDKGRDFATVRKVLSMPQVNIVKKTEVQTGGFSKESILPKRNSDKLIARKKDWDPKKYGGFDSPTVAYSVLVVAKVEKGKSKKLKSVKELLGITIMERSSFEKNPIDFLEAKGYKEVKKDLIIKLPKYSLFELENGRKRMLASAGELQKGNELALPSKYVNFLYLASHYEKLKGSPEDNEQKQLFVEQHKHYLDEIIEQISEFSKRVILADANLDKVLSAYNKHRDKPIREQAENIIHLFTLTNLGAPAAFKYFDTTIDRKRYTSTKEVLDATLIHQSITGLYETRIDLSQLGGDGGGSAGSAAGSGEFGGTLGDQGSRGSDPLPEPRVTLTVEGIPTEFLVNTGAEHSVLTKPMGKMGSKRTVVAGATGSKVYPWTTKRLLKIGQKQVTHSFLVIPECPAPLLGRDLLTKLKAQIQFSTEGPQVTWEDRPAMCLVLNLEEEYRLHEKPVPPSIDPSWLQLFPMVWAEKAGMGLANQVPPVVVELKSDASPVAVRQYPMSKEAREGIRPHIQRFLDLGILVPCQSPWNTPLLPVKKPGTNDYRPVQDLREVNKRVQDIHPTVPNPYNLLSSLPPSHTWYSVLDLKDAFFCLKLHPNSQPLFAFEWRDPEKGNTGQLTWTRLPQGFKNSPTLFDEALHRDLASFRALNPQVVMLQYVDDLLVAAPTYRDCKEGTRRLLQELSKLGYRVSAKKAQLCREEVTYLGYLLKGGKRWLTPARKATVMKIPTPTTPRQVREFLGTAGFCRLWIPGFASLAAPLYPLTREKVPFTWTEAHQEAFGRIKEALLSAPALALPDLTKPFALYVDEKEGVARGVLTQTLGPWRRPVAYLSKKLDPVASGWPTCLKAIAAVALLLKDADKLTLGQNVLVIAPHNLESIVRQPPDRWMTNARMTHYQSLLLNERVSFAPPAILNPATLLPVESDDTPIHICSEILAEETGTRPDLRDQPLPGVPAWYTDGSSFIMDGRRQAGAAIVDNKRTVWASNLPEGTSAQKAELIALTQALRLAEGKSINIYTDSRYAFATAHVHGAIYKQRGLLTSAGKDIKNKEEILALLEAIHLPKRVAIIHCPGHQRGTDPVATGNRKADEAAKQAAQSTRILTETTKNAGKRTADGSEFEKRTADGSEFESPKKKAKVE

SEQ ID NO: 7714 - protein, 2128 aa, synthetic construct
MPAAKRVKLDGGDKKYSIGLDIGTNSVGWAVITDEYKVPSKKFKVLGNTDRHSIKKNLIGALLFDSGETAEATRLKRTARRRYTRRKNRICYLQEIFSNEMAKVDDSFFHRLEESFLVEEDKKHERHPIFGNIVDEVAYHEKYPTIYHLRKKLVDSTDKADLRLIYLALAHMIKFRGHFLIEGDLNPDNSDVDKLFIQLVQTYNQLFEENPINASGVDAKAILSARLSKSRRLENLIAQLPGEKKNGLFGNLIALSLGLTPNFKSNFDLAEDAKLQLSKDTYDDDLDNLLAQIGDQYADLFLAAKNLSDAILLSDILRVNTEITKAPLSASMIKRYDEHHQDLTLLKALVRQQLPEKYKEIFFDQSKNGYAGYIDGGASQEEFYKFIKPILEKMDGTEELLVKLNREDLLRKQRTFDNGSIPHQIHLGELHAILRRQEDFYPFLKDNREKIEKILTFRIPYYVGPLARGNSRFAWMTRKSEETITPWNFEEVVDKGASAQSFIERMTNFDKNLPNEKVLPKHSLLYEYFTVYNELTKVKYVTEGMRKPAFLSGEQKKAIVDLLFKTNRKVTVKQLKEDYFKKIECFDSVEISGVEDRFNASLGTYHDLLKIIKDKDFLDNEENEDILEDIVLTLTLFEDREMIEERLKTYAHLFDDKVMKQLKRRRYTGWGRLSRKLINGIRDKQSGKTILDFLKSDGFANRNFMQLIHDDSLTFKEDIQKAQVSGQGDSLHEHIANLAGSPAIKKGILQTVKVVDELVKVMGRHKPENIVIEMARENQTTQKGQKNSRERMKRIEEGIKELGSQILKEHPVENTQLQNEKLYLYYLQNGRDMYVDQELDINRLSDYDVDHIVPQSFLKDDSIDNKVLTRSDKARGKSDNVPSEEVVKKMKNYWRQLLNAKLITQRKFDNLTKAERGGLSELDKAGFIKRQLVETRQITKHVAQILDSRMNTKYDENDKLIREVKVITLKSKLVSDFRKDFQFYKVREINNYHHAHDAYLNAVVGTALIKKYPKLESEFVYGDYKVYDVRKMIAKSEQEIGKATAKYFFYSNIMNFFKTEITLANGEIRKRPLIETNGETGEIVWDKGRDFATVRKVLSMPQVNIVKKTEVQTGGFSKESILPKRNSDKLIARKKDWDPKKYGGFDSPTVAYSVLVVAKVEKGKSKKLKSVKELLGITIMERSSFEKNPIDFLEAKGYKEVKKDLIIKLPKYSLFELENGRKRMLASAGELQKGNELALPSKYVNFLYLASHYEKLKGSPEDNEQKQLFVEQHKHYLDEIIEQISEFSKRVILADANLDKVLSAYNKHRDKPIREQAENIIHLFTLTNLGAPAAFKYFDTTIDRKRYTSTKEVLDATLIHQSITGLYETRIDLSQLGGDGGGSAGSAAGSGEFGGLLGRDLLTKLKAQIQFSTEGPQVTWEDRPAMCLVLNLEEEYRLHEKPVPPSIDPSWLQLFPMVWAEKAGMGLANQVPPVVVELKSDASPVAVRQYPMSKEAREGIRPHIQRFLDLGILVPCQSPWNTPLLPVKKPGTNDYRPVQDLREVNKRVQDIHPTVPNPYNLLSSLPPSHTWYSVLDLKDAFFCLKLHPNSQPLFAFEWRDPEKGNTGQLTWTRLPQGFKNSPTLFNEALHRDLASFRALNPQVVMLQYVDDLLVAAPTYRDCKEGTRRLLQELSKLGYRVSAKKAQLCREEVTYLGYLLKGGKRWLTPARKATVMKIPTPTTPRQVREFLGTAGFCRLWIPGFASLAAPLYPLTRPKVPFTWTEAHQEAFGRIKEALLSAPALALPDLTKPFALYVDEKEGVARGVLTQTLGPWRRPVAYLSKKLDPVASGWPTCLKAIAAVALLLKDADKLTLGQNVLVIAPHNLESIVRQPPDRWMTNARMTHYQSLLLNERVSFAPPAILNPATLLPVESDDTPIHICSEILAEETGTRPDLRDQPLPGVPAWYTDGSSFIMDGRRQAGAAIVDNKRTVWASNLPEGTSAQKAELIALTQALRLAEGKSINIYTDSRYAFATAHVHGAIYKQRGWLTSAGKDIKNKEEILALLEAIHLPKRVAIIHCPGHQRGTDPVATGNRKADEAAKQAAQSTRILTETTKNAGKRTADGSEFEKRTADGSEFESPKKKAKVE

SEQ ID NO: 7715 - protein, 2219 aa, synthetic construct
MPAAKRVKLDGGDKKYSIGLDIGTNSVGWAVITDEYKVPSKKFKVLGNTDRHSIKKNLIGALLFDSGETAEATRLKRTARRRYTRRKNRICYLQEIFSNEMAKVDDSFFHRLEESFLVEEDKKHERHPIFGNIVDEVAYHEKYPTIYHLRKKLVDSTDKADLRLIYLALAHMIKFRGHFLIEGDLNPDNSDVDKLFIQLVQTYNQLFEENPINASGVDAKAILSARLSKSRRLENLIAQLPGEKKNGLFGNLIALSLGLTPNFKSNFDLAEDAKLQLSKDTYDDDLDNLLAQIGDQYADLFLAAKNLSDAILLSDILRVNTEITKAPLSASMIKRYDEHHQDLTLLKALVRQQLPEKYKEIFFDQSKNGYAGYIDGGASQEEFYKFIKPILEKMDGTEELLVKLNREDLLRKQRTFDNGSIPHQIHLGELHAILRRQEDFYPFLKDNREKIEKILTFRIPYYVGPLARGNSRFAWMTRKSEETITPWNFEEVVDKGASAQSFIERMTNFDKNLPNEKVLPKHSLLYEYFTVYNELTKVKYVTEGMRKPAFLSGEQKKAIVDLLFKTNRKVTVKQLKEDYFKKIECFDSVEISGVEDRFNASLGTYHDLLKIIKDKDFLDNEENEDILEDIVLTLTLFEDREMIEERLKTYAHLFDDKVMKQLKRRRYTGWGRLSRKLINGIRDKQSGKTILDFLKSDGFANRNFMQLIHDDSLTFKEDIQKAQVSGQGDSLHEHIANLAGSPAIKKGILQTVKVVDELVKVMGRHKPENIVIEMARENQTTQKGQKNSRERMKRIEEGIKELGSQILKEHPVENTQLQNEKLYLYYLQNGRDMYVDQELDINRLSDYDVDHIVPQSFLKDDSIDNKVLTRSDKARGKSDNVPSEEVVKKMKNYWRQLLNAKLITQRKFDNLTKAERGGLSELDKAGFIKRQLVETRQITKHVAQILDSRMNTKYDENDKLIREVKVITLKSKLVSDFRKDFQFYKVREINNYHHAHDAYLNAVVGTALIKKYPKLESEFVYGDYKVYDVRKMIAKSEQEIGKATAKYFFYSNIMNFFKTEITLANGEIRKRPLIETNGETGEIVWDKGRDFATVRKVLSMPQVNIVKKTEVQTGGFSKESILPKRNSDKLIARKKDWDPKKYGGFDSPTVAYSVLVVAKVEKGKSKKLKSVKELLGITIMERSSFEKNPIDFLEAKGYKEVKKDLIIKLPKYSLFELENGRKRMLASAGELQKGNELALPSKYVNFLYLASHYEKLKGSPEDNEQKQLFVEQHKHYLDEIIEQISEFSKRVILADANLDKVLSAYNKHRDKPIREQAENIIHLFTLTNLGAPAAFKYFDTTIDRKRYTSTKEVLDATLIHQSITGLYETRIDLSQLGGDGGGSAGSAAGSGEFGGTLGDQGSRGSDPLPEPRVTLTVEGIPTEFLVNTGAEHSVLTKPMGKMGSKRTVVAGATGSKVYPWTTKRLLKIGQKQVTHSFLVIPECPAPLLGRDLLTKLKAQIQFSTEGPQVTWEDRPAMCLVLNLEEEYRLHEKPVPPSIDPSWLQLFPMVWAEKAGMGLANQVPPVVVELKSDASPVAVRQYPMSKEAREGIRPHIQRFLDLGILVPCQSPWNTPLLPVKKPGTNDYRPVQDLREVNKRVQDIHPTVPNPYNLLSSLPPSHTWYSVLDLKDAFFCLKLHPNSQPLFAFEWRDPEKGNTGQLTWTRLPQGFKNSPTLFNEALHRDLASFRALNPQVVMLQYVDDLLVAAPTYRDCKEGTRRLLQELSKLGYRVSAKKAQLCREEVTYLGYLLKGGKRWLTPARKATVMKIPTPTTPRQVREFLGTAGFCRLWIPGFASLAAPLYPLTRPKVPFTWTEAHQEAFGRIKEALLSAPALALPDLTKPFALYVDEKEGVARGVLTQTLGPWRRPVAYLSKKLDPVASGWPTCLKAIAAVALLLKDADKLTLGQNVLVIAPHNLESIVRQPPDRWMTNARMTHYQSLLLNERVSFAPPAILNPATLLPVESDDTPIHICSEILAEETGTRPDLRDQPLPGVPAWYTDGSSFIMDGRRQAGAAIVDNKRTVWASNLPEGTSAQKAELIALTQALRLAEGKSINIYTDSRYAFATAHVHGAIYKQRGWLTSAGKDIKNKEEILALLEAIHLPKRVAIIHCPGHQRGTDPVATGNRKADEAAKQAAQSTRILTETTKNAGKRTADGSEFEKRTADGSEFESPKKKAKVE

SEQ ID NO: 7716 - protein, 2097 aa, synthetic construct
MPAAKRVKLDGGDKKYSIGLDIGTNSVGWAVITDEYKVPSKKFKVLGNTDRHSIKKNLIGALLFDSGETAEATRLKRTARRRYTRRKNRICYLQEIFSNEMAKVDDSFFHRLEESFLVEEDKKHERHPIFGNIVDEVAYHEKYPTIYHLRKKLVDSTDKADLRLIYLALAHMIKFRGHFLIEGDLNPDNSDVDKLFIQLVQTYNQLFEENPINASGVDAKAILSARLSKSRRLENLIAQLPGEKKNGLFGNLIALSLGLTPNFKSNFDLAEDAKLQLSKDTYDDDLDNLLAQIGDQYADLFLAAKNLSDAILLSDILRVNTEITKAPLSASMIKRYDEHHQDLTLLKALVRQQLPEKYKEIFFDQSKNGYAGYIDGGASQEEFYKFIKPILEKMDGTEELLVKLNREDLLRKQRTFDNGSIPHQIHLGELHAILRRQEDFYPFLKDNREKIEKILTFRIPYYVGPLARGNSRFAWMTRKSEETITPWNFEEVVDKGASAQSFIERMTNFDKNLPNEKVLPKHSLLYEYFTVYNELTKVKYVTEGMRKPAFLSGEQKKAIVDLLFKTNRKVTVKQLKEDYFKKIECFDSVEISGVEDRFNASLGTYHDLLKIIKDKDFLDNEENEDILEDIVLTLTLFEDREMIEERLKTYAHLFDDKVMKQLKRRRYTGWGRLSRKLINGIRDKQSGKTILDFLKSDGFANRNFMQLIHDDSLTFKEDIQKAQVSGQGDSLHEHIANLAGSPAIKKGILQTVKVVDELVKVMGRHKPENIVIEMARENQTTQKGQKNSRERMKRIEEGIKELGSQILKEHPVENTQLQNEKLYLYYLQNGRDMYVDQELDINRLSDYDVDHIVPQSFLKDDSIDNKVLTRSDKARGKSDNVPSEEVVKKMKNYWRQLLNAKLITQRKFDNLTKAERGGLSELDKAGFIKRQLVETRQITKHVAQILDSRMNTKYDENDKLIREVKVITLKSKLVSDFRKDFQFYKVREINNYHHAHDAYLNAVVGTALIKKYPKLESEFVYGDYKVYDVRKMIAKSEQEIGKATAKYFFYSNIMNFFKTEITLANGEIRKRPLIETNGETGEIVWDKGRDFATVRKVLSMPQVNIVKKTEVQTGGFSKESILPKRNSDKLIARKKDWDPKKYGGFDSPTVAYSVLVVAKVEKGKSKKLKSVKELLGITIMERSSFEKNPIDFLEAKGYKEVKKDLIIKLPKYSLFELENGRKRMLASAGELQKGNELALPSKYVNFLYLASHYEKLKGSPEDNEQKQLFVEQHKHYLDEIIEQISEFSKRVILADANLDKVLSAYNKHRDKPIREQAENIIHLFTLTNLGAPAAFKYFDTTIDRKRYTSTKEVLDATLIHQSITGLYETRIDLSQLGGDGGGSAGSAAGSGEFGGTLNLEDEYRLYETSAEPEVSPGSTWLSDFPQAWAETGGMGLAVRQAPLIIPLKATSTPVSIKQYPMSQEAKLGIKPHIQRLLDQGILVPCQSPWNTPLLPVKKPGTNDYRPVQDLREVNKRVEDIHPTVPNPYNLLSGLPPSHRWYTVLDLKDAFFCLRLHPTSQPLFAFEWRDPGMGISGQLTWTRLPQGFKNSPTLFNEALHRDLADFRIQHPDLILLQYVDDILLAATSELDCQQGTRALLLTLGNLGYRASAKKAQLCQKQVKYLGYLLKEGQRWLTEARKETVMGQPTPKTPRQLREFLGTAGFCRLWIPGFAEMAAPLYPLTKPGTLFNWGPDQQKAYQEIKQALLTAPALGLPDLTKPFELFVDEKQGYAKGVLTQKLGPWRRPVAYLSKKLDPVAAGWPPCLRMVAAIAVLRKDAGKLTMGQPLVILAPHAVEALVKQPPDRWLSNARMTHYQAMLLDTDRVQFGPVVALNPATLLPLPEEGAPHDCLEILAETHGTRPDLTDQPIPDADHTWYTDGSSFLQEGQRKAGAAVTTETEVIWARALPAGTSAQRAELIALTQALKMAEGKRLNVYTDSRYAFATAHIHGEIYRRRGWLTSEGREIKNKSEILALLKALFLPKRLSIIHCLGHQKGDSAEARGNRLADQAAREAAIKTPPDTSTLLAGKRTADGSEFEKRTADGSEFESPKKKAKVE

SEQ ID NO: 7717 - protein, 2097 aa, synthetic construct
MPAAKRVKLDGGDKKYSIGLDIGTNSVGWAVITDEYKVPSKKFKVLGNTDRHSIKKNLIGALLFDSGETAEATRLKRTARRRYTRRKNRICYLQEIFSNEMAKVDDSFFHRLEESFLVEEDKKHERHPIFGNIVDEVAYHEKYPTIYHLRKKLVDSTDKADLRLIYLALAHMIKFRGHFLIEGDLNPDNSDVDKLFIQLVQTYNQLFEENPINASGVDAKAILSARLSKSRRLENLIAQLPGEKKNGLFGNLIALSLGLTPNFKSNFDLAEDAKLQLSKDTYDDDLDNLLAQIGDQYADLFLAAKNLSDAILLSDILRVNTEITKAPLSASMIKRYDEHHQDLTLLKALVRQQLPEKYKEIFFDQSKNGYAGYIDGGASQEEFYKFIKPILEKMDGTEELLVKLNREDLLRKQRTFDNGSIPHQIHLGELHAILRRQEDFYPFLKDNREKIEKILTFRIPYYVGPLARGNSRFAWMTRKSEETITPWNFEEVVDKGASAQSFIERMTNFDKNLPNEKVLPKHSLLYEYFTVYNELTKVKYVTEGMRKPAFLSGEQKKAIVDLLFKTNRKVTVKQLKEDYFKKIECFDSVEISGVEDRFNASLGTYHDLLKIIKDKDFLDNEENEDILEDIVLTLTLFEDREMIEERLKTYAHLFDDKVMKQLKRRRYTGWGRLSRKLINGIRDKQSGKTILDFLKSDGFANRNFMQLIHDDSLTFKEDIQKAQVSGQGDSLHEHIANLAGSPAIKKGILQTVKVVDELVKVMGRHKPENIVIEMARENQTTQKGQKNSRERMKRIEEGIKELGSQILKEHPVENTQLQNEKLYLYYLQNGRDMYVDQELDINRLSDYDVDHIVPQSFLKDDSIDNKVLTRSDKARGKSDNVPSEEVVKKMKNYWRQLLNAKLITQRKFDNLTKAERGGLSELDKAGFIKRQLVETRQITKHVAQILDSRMNTKYDENDKLIREVKVITLKSKLVSDFRKDFQFYKVREINNYHHAHDAYLNAVVGTALIKKYPKLESEFVYGDYKVYDVRKMIAKSEQEIGKATAKYFFYSNIMNFFKTEITLANGEIRKRPLIETNGETGEIVWDKGRDFATVRKVLSMPQVNIVKKTEVQTGGFSKESILPKRNSDKLIARKKDWDPKKYGGFDSPTVAYSVLVVAKVEKGKSKKLKSVKELLGITIMERSSFEKNPIDFLEAKGYKEVKKDLIIKLPKYSLFELENGRKRMLASAGELQKGNELALPSKYVNFLYLASHYEKLKGSPEDNEQKQLFVEQHKHYLDEIIEQISEFSKRVILADANLDKVLSAYNKHRDKPIREQAENIIHLFTLTNLGAPAAFKYFDTTIDRKRYTSTKEVLDATLIHQSITGLYETRIDLSQLGGDGGGSAGSAAGSGEFGGTLNIEDEHRLHETSKEPDVSLGSTWLSDFPQAWAETGGMGLAVRQAPLIIPLKATSTPVSIKQYPMSQEARLGIKPHIQRLLDQGILVPCQSPWNTPLLPVKKPGTNDYRPVQDLREVNKRVEDIHPTVPNPYNLLSGLPPSHQWYTVLDLKDAFFCLRLHPTSQPLFAFEWRDPEMGISGQLTWTRLPQGFKNSPTLFDEALHRDLADFRIQHPDLILLQYVDDLLLAATSELDCQQGTRALLQTLGNLGYRASAKKAQICQKQVKYLGYLLKEGQRWLTEARKETVMGQPTPKTPRQLREFLGTAGFCRLWIPGFAEMAAPLYPLTKTGTLFNWGPDQQKAYQEIKQALLTAPALGLPDLTKPFELFVDEKQGYAKGVLTQKLGPWRRPVAYLSKKLDPVAAGWPPCLRMVAAIAVLTKDAGKLTMGQPLVILAPHAVEALVKQPPDRWLSNARMTHYQALLLDTDRVQFGPVVALNPATLLPLPEEGLQHNCLDILAEAHGTRPDLTDQPLPDADHTWYTDGSSLLQEGQRKAGAAVTTETEVIWAKALPAGTSAQRAELIALTQALKMAEGKKLNVYTDSRYAFATAHIHGEIYRRRGLLTSEGKEIKNKDEILALLKALFLPKRLSIIHCPGHQKGHSAEARGNRMADQAARKAAITETPDTSTLLAGKRTADGSEFEKRTADGSEFESPKKKAKVE

SEQ ID NO: 7718 - protein, 2177 aa, synthetic construct
MPAAKRVKLDGGDKKYSIGLDIGTNSVGWAVITDEYKVPSKKFKVLGNTDRHSIKKNLIGALLFDSGETAEATRLKRTARRRYTRRKNRICYLQEIFSNEMAKVDDSFFHRLEESFLVEEDKKHERHPIFGNIVDEVAYHEKYPTIYHLRKKLVDSTDKADLRLIYLALAHMIKFRGHFLIEGDLNPDNSDVDKLFIQLVQTYNQLFEENPINASGVDAKAILSARLSKSRRLENLIAQLPGEKKNGLFGNLIALSLGLTPNFKSNFDLAEDAKLQLSKDTYDDDLDNLLAQIGDQYADLFLAAKNLSDAILLSDILRVNTEITKAPLSASMIKRYDEHHQDLTLLKALVRQQLPEKYKEIFFDQSKNGYAGYIDGGASQEEFYKFIKPILEKMDGTEELLVKLNREDLLRKQRTFDNGSIPHQIHLGELHAILRRQEDFYPFLKDNREKIEKILTFRIPYYVGPLARGNSRFAWMTRKSEETITPWNFEEVVDKGASAQSFIERMTNFDKNLPNEKVLPKHSLLYEYFTVYNELTKVKYVTEGMRKPAFLSGEQKKAIVDLLFKTNRKVTVKQLKEDYFKKIECFDSVEISGVEDRFNASLGTYHDLLKIIKDKDFLDNEENEDILEDIVLTLTLFEDREMIEERLKTYAHLFDDKVMKQLKRRRYTGWGRLSRKLINGIRDKQSGKTILDFLKSDGFANRNFMQLIHDDSLTFKEDIQKAQVSGQGDSLHEHIANLAGSPAIKKGILQTVKVVDELVKVMGRHKPENIVIEMARENQTTQKGQKNSRERMKRIEEGIKELGSQILKEHPVENTQLQNEKLYLYYLQNGRDMYVDQELDINRLSDYDVDHIVPQSFLKDDSIDNKVLTRSDKARGKSDNVPSEEVVKKMKNYWRQLLNAKLITQRKFDNLTKAERGGLSELDKAGFIKRQLVETRQITKHVAQILDSRMNTKYDENDKLIREVKVITLKSKLVSDFRKDFQFYKVREINNYHHAHDAYLNAVVGTALIKKYPKLESEFVYGDYKVYDVRKMIAKSEQEIGKATAKYFFYSNIMNFFKTEITLANGEIRKRPLIETNGETGEIVWDKGRDFATVRKVLSMPQVNIVKKTEVQTGGFSKESILPKRNSDKLIARKKDWDPKKYGGFDSPTVAYSVLVVAKVEKGKSKKLKSVKELLGITIMERSSFEKNPIDFLEAKGYKEVKKDLIIKLPKYSLFELENGRKRMLASAGELQKGNELALPSKYVNFLYLASHYEKLKGSPEDNEQKQLFVEQHKHYLDEIIEQISEFSKRVILADANLDKVLSAYNKHRDKPIREQAENIIHLFTLTNLGAPAAFKYFDTTIDRKRYTSTKEVLDATLIHQSITGLYETRIDLSQLGGDGGGSAGSAAGSGEFGGMDPLQLLQPLEAEIKGTKLKAHWNSGATITCVPQAFLEEEVPIKNIWIKTIHGEKEQPVYYLTFKIQGRKVEAEVISSPYDYILVSPSDIPWLMKKPLQLTTLVPLQEYEERLLKQTMLTGSYKEKLQSLFLKYDALWQHWENQVGHRRIKPHHIATGTVNPRPQKQYPINPKAKASIQTVINDLLKQGVLIQQNSIMNTPVYPVPKPDGKWRMVLDYREVNKTIPLIAAQNQHSAGILSSIFRGKYKTTLDLSNGFWAHSITPESYWLTAFTWLGQQYCWTRLPQGFLNSPALFNADVVDLLKEVPNVQVYVDDIYISHDDPREHLEQLEKVFSLLLNAGYVVSLKKSEIAQHEVEFLGFNITKEGRGLTETFKQKLLNITPPRDLKQLQSILGLLNFARNFIPNFSELVKPLYNIIATAPGKYITWTTDNSQQLQNIISMLNSAENLEERNPEVRLIMKVNTSPSAGYIRFYNEFAKRPIMYLNYVYTKAEVKFTNTEKLLTTIHKGLIKALDLGMGQEILVYSPIVSMTKIQKTPLPERKALPIRWITWMSYLEDPRIQFHYDKTLPELQQVPTVTDDIIAKIKHPSEFSMVFYTDGSAIKHPNVNKSHNAGMGIAQVQFKPEFTVINTWSIPLGDHTAQLAEVAAVEFACKKALKIDGPVLIVTDSFYVAESVNKELPYWQSNGFFNNKKKPLKHVSKWKSIADCIQLKPDIIIIHEKGHQPTASTFHTEGNNLADKLATQGSYVVNAGKRTADGSEFEKRTADGSEFESPKKKAKVE

SEQ ID NO: 7719 - protein, 2097 aa, synthetic construct
MPAAKRVKLDGGDKKYSIGLDIGTNSVGWAVITDEYKVPSKKFKVLGNTDRHSIKKNLIGALLFDSGETAEATRLKRTARRRYTRRKNRICYLQEIFSNEMAKVDDSFFHRLEESFLVEEDKKHERHPIFGNIVDEVAYHEKYPTIYHLRKKLVDSTDKADLRLIYLALAHMIKFRGHFLIEGDLNPDNSDVDKLFIQLVQTYNQLFEENPINASGVDAKAILSARLSKSRRLENLIAQLPGEKKNGLFGNLIALSLGLTPNFKSNFDLAEDAKLQLSKDTYDDDLDNLLAQIGDQYADLFLAAKNLSDAILLSDILRVNTEITKAPLSASMIKRYDEHHQDLTLLKALVRQQLPEKYKEIFFDQSKNGYAGYIDGGASQEEFYKFIKPILEKMDGTEELLVKLNREDLLRKQRTFDNGSIPHQIHLGELHAILRRQEDFYPFLKDNREKIEKILTFRIPYYVGPLARGNSRFAWMTRKSEETITPWNFEEVVDKGASAQSFIERMTNFDKNLPNEKVLPKHSLLYEYFTVYNELTKVKYVTEGMRKPAFLSGEQKKAIVDLLFKTNRKVTVKQLKEDYFKKIECFDSVEISGVEDRFNASLGTYHDLLKIIKDKDFLDNEENEDILEDIVLTLTLFEDREMIEERLKTYAHLFDDKVMKQLKRRRYTGWGRLSRKLINGIRDKQSGKTILDFLKSDGFANRNFMQLIHDDSLTFKEDIQKAQVSGQGDSLHEHIANLAGSPAIKKGILQTVKVVDELVKVMGRHKPENIVIEMARENQTTQKGQKNSRERMKRIEEGIKELGSQILKEHPVENTQLQNEKLYLYYLQNGRDMYVDQELDINRLSDYDVDHIVPQSFLKDDSIDNKVLTRSDKARGKSDNVPSEEVVKKMKNYWRQLLNAKLITQRKFDNLTKAERGGLSELDKAGFIKRQLVETRQITKHVAQILDSRMNTKYDENDKLIREVKVITLKSKLVSDFRKDFQFYKVREINNYHHAHDAYLNAVVGTALIKKYPKLESEFVYGDYKVYDVRKMIAKSEQEIGKATAKYFFYSNIMNFFKTEITLANGEIRKRPLIETNGETGEIVWDKGRDFATVRKVLSMPQVNIVKKTEVQTGGFSKESILPKRNSDKLIARKKDWDPKKYGGFDSPTVAYSVLVVAKVEKGKSKKLKSVKELLGITIMERSSFEKNPIDFLEAKGYKEVKKDLIIKLPKYSLFELENGRKRMLASAGELQKGNELALPSKYVNFLYLASHYEKLKGSPEDNEQKQLFVEQHKHYLDEIIEQISEFSKRVILADANLDKVLSAYNKHRDKPIREQAENIIHLFTLTNLGAPAAFKYFDTTIDRKRYTSTKEVLDATLIHQSITGLYETRIDLSQLGGDGGGSAGSAAGSGEFGGTLNIEDEYRLHETSKEPDVPLGSTWLSDFPQAWAETGGMGLAVRQAPLIIPLKATSTPVSIKQYPMSQEARLGIKPHIQRLLDQGILVPCQSPWNTPLLPVKKPGTNDYRPVQDLREVNKRVEDIHPTVPNPYNLLSGLPPSHQWYTVLDLKDAFFCLRLHPTSQPLFAFEWRDPEMGISGQLTWTRLPQGFKNSPTLFNEALHRDLADFRIQHPDLILLQYVDDLLLAATSEQDCQRGTRALLQTLGNLGYRASAKKAQICQKQVKYLGYLLKEGQRWLTEARKETVMGQPTPKTPRQLREFLGTAGFCRLWIPGFAEMAAPLYPLTKPGTLFNWGPDQQKAYQEIKQALLTAPALGLPDLTKPFELFVDEKQGYAKGVLTQKLGPWRRPVAYLSKKLDPVAAGWPPCLRMVAAIAVLTKDAGKLTMGQPLVILAPHAVEALVKQPPDRWLSNARMTHYQAMLLDTDRVQFGPVVALNPATLLPLPEKEAPHDCLEILAETHGTRPDLTDQPIPDADYTWYTDGSSFLQEGQRRAGAAVTTETEVIWARALPAGTSAQRAELIALTQALKMAEGKKLNVYTDSRYAFATAHVHGEIYRRRGWLTSEGREIKNKNEILALLKALFLPKRLSIIHCPGHQKGNSAEARGNRMADQAAREAAMKAVLETSTLLAGKRTADGSEFEKRTADGSEFESPKKKAKVE

SEQ ID NO: 7720 - protein, 2120 aa, synthetic construct
MPAAKRVKLDGGDKKYSIGLDIGTNSVGWAVITDEYKVPSKKFKVLGNTDRHSIKKNLIGALLFDSGETAEATRLKRTARRRYTRRKNRICYLQEIFSNEMAKVDDSFFHRLEESFLVEEDKKHERHPIFGNIVDEVAYHEKYPTIYHLRKKLVDSTDKADLRLIYLALAHMIKFRGHFLIEGDLNPDNSDVDKLFIQLVQTYNQLFEENPINASGVDAKAILSARLSKSRRLENLIAQLPGEKKNGLFGNLIALSLGLTPNFKSNFDLAEDAKLQLSKDTYDDDLDNLLAQIGDQYADLFLAAKNLSDAILLSDILRVNTEITKAPLSASMIKRYDEHHQDLTLLKALVRQQLPEKYKEIFFDQSKNGYAGYIDGGASQEEFYKFIKPILEKMDGTEELLVKLNREDLLRKQRTFDNGSIPHQIHLGELHAILRRQEDFYPFLKDNREKIEKILTFRIPYYVGPLARGNSRFAWMTRKSEETITPWNFEEVVDKGASAQSFIERMTNFDKNLPNEKVLPKHSLLYEYFTVYNELTKVKYVTEGMRKPAFLSGEQKKAIVDLLFKTNRKVTVKQLKEDYFKKIECFDSVEISGVEDRFNASLGTYHDLLKIIKDKDFLDNEENEDILEDIVLTLTLFEDREMIEERLKTYAHLFDDKVMKQLKRRRYTGWGRLSRKLINGIRDKQSGKTILDFLKSDGFANRNFMQLIHDDSLTFKEDIQKAQVSGQGDSLHEHIANLAGSPAIKKGILQTVKVVDELVKVMGRHKPENIVIEMARENQTTQKGQKNSRERMKRIEEGIKELGSQILKEHPVENTQLQNEKLYLYYLQNGRDMYVDQELDINRLSDYDVDHIVPQSFLKDDSIDNKVLTRSDKARGKSDNVPSEEVVKKMKNYWRQLLNAKLITQRKFDNLTKAERGGLSELDKAGFIKRQLVETRQITKHVAQILDSRMNTKYDENDKLIREVKVITLKSKLVSDFRKDFQFYKVREINNYHHAHDAYLNAVVGTALIKKYPKLESEFVYGDYKVYDVRKMIAKSEQEIGKATAKYFFYSNIMNFFKTEITLANGEIRKRPLIETNGETGEIVWDKGRDFATVRKVLSMPQVNIVKKTEVQTGGFSKESILPKRNSDKLIARKKDWDPKKYGGFDSPTVAYSVLVVAKVEKGKSKKLKSVKELLGITIMERSSFEKNPIDFLEAKGYKEVKKDLIIKLPKYSLFELENGRKRMLASAGELQKGNELALPSKYVNFLYLASHYEKLKGSPEDNEQKQLFVEQHKHYLDEIIEQISEFSKRVILADANLDKVLSAYNKHRDKPIREQAENIIHLFTLTNLGAPAAFKYFDTTIDRKRYTSTKEVLDATLIHQSITGLYETRIDLSQLGGDGGSGGSSGGSSGSETPGTSESATPESSGGSSGGSSGGTAPLEEEYRLFLEAPIQNVTLLEQWKREIPKVWAEINPPGLASTQAPIHVQLLSTALPVRVRQYPITLEAKRSLRETIRKFRAAGILRPVHSPWNTPLLPVRKSGTSEYRMVQDLREVNKRVETIHPTVPNPYTLLSLLPPDRIWYSVLDLKDAFFCIPLAPESQLIFAFEWADAEEGESGQLTWTRLPQGFKNSPTLFDEALNRDLQGFRLDHPSVSLLQYVDDLLIAADTQAACLSATRDLLMTLAELGYRVSGKKAQLCQEEVTYLGFKIHKGSRSLSNSRTQAILQIPVPKTKRQVREFLGTIGYCRLWIPGFAELAQPLYAATRGGNDPLVWGEKEEEAFQSLKLALTQPPALALPSLDKPFQLFVEETSGAAKGVLTQALGPWKRPVAYLSKRLDPVAAGWPRCLRAIAAAALLTREASKLTFGQDIEITSSHNLESLLRSPPDKWLTNARITQYQVLLLDPPRVRFKQTAALNPATLLPETDDTLPIHHCLDTLDSLTSTRPDLTDQPLAQAEATLFTDGSSYIRDGKRYAGAAVVTLDSVIWAEPLPIGTSAQKAELIALTKALEWSKDKSVNIYTDSRYAFATLHVHGMIYRERGLLTAGGKAIKNAPEILALLTAVWLPKRVAVMHCKGHQKDDAPTSTGNRRADEVAREVAIRPLSTQATISAGKRTADGSEFEKRTADGSEFESPKKKAKVE

SEQ ID NO: 7721 - protein, 2120 aa, synthetic construct
MPAAKRVKLDGGDKKYSIGLDIGTNSVGWAVITDEYKVPSKKFKVLGNTDRHSIKKNLIGALLFDSGETAEATRLKRTARRRYTRRKNRICYLQEIFSNEMAKVDDSFFHRLEESFLVEEDKKHERHPIFGNIVDEVAYHEKYPTIYHLRKKLVDSTDKADLRLIYLALAHMIKFRGHFLIEGDLNPDNSDVDKLFIQLVQTYNQLFEENPINASGVDAKAILSARLSKSRRLENLIAQLPGEKKNGLFGNLIALSLGLTPNFKSNFDLAEDAKLQLSKDTYDDDLDNLLAQIGDQYADLFLAAKNLSDAILLSDILRVNTEITKAPLSASMIKRYDEHHQDLTLLKALVRQQLPEKYKEIFFDQSKNGYAGYIDGGASQEEFYKFIKPILEKMDGTEELLVKLNREDLLRKQRTFDNGSIPHQIHLGELHAILRRQEDFYPFLKDNREKIEKILTFRIPYYVGPLARGNSRFAWMTRKSEETITPWNFEEVVDKGASAQSFIERMTNFDKNLPNEKVLPKHSLLYEYFTVYNELTKVKYVTEGMRKPAFLSGEQKKAIVDLLFKTNRKVTVKQLKEDYFKKIECFDSVEISGVEDRFNASLGTYHDLLKIIKDKDFLDNEENEDILEDIVLTLTLFEDREMIEERLKTYAHLFDDKVMKQLKRRRYTGWGRLSRKLINGIRDKQSGKTILDFLKSDGFANRNFMQLIHDDSLTFKEDIQKAQVSGQGDSLHEHIANLAGSPAIKKGILQTVKVVDELVKVMGRHKPENIVIEMARENQTTQKGQKNSRERMKRIEEGIKELGSQILKEHPVENTQLQNEKLYLYYLQNGRDMYVDQELDINRLSDYDVDHIVPQSFLKDDSIDNKVLTRSDKARGKSDNVPSEEVVKKMKNYWRQLLNAKLITQRKFDNLTKAERGGLSELDKAGFIKRQLVETRQITKHVAQILDSRMNTKYDENDKLIREVKVITLKSKLVSDFRKDFQFYKVREINNYHHAHDAYLNAVVGTALIKKYPKLESEFVYGDYKVYDVRKMIAKSEQEIGKATAKYFFYSNIMNFFKTEITLANGEIRKRPLIETNGETGEIVWDKGRDFATVRKVLSMPQVNIVKKTEVQTGGFSKESILPKRNSDKLIARKKDWDPKKYGGFDSPTVAYSVLVVAKVEKGKSKKLKSVKELLGITIMERSSFEKNPIDFLEAKGYKEVKKDLIIKLPKYSLFELENGRKRMLASAGELQKGNELALPSKYVNFLYLASHYEKLKGSPEDNEQKQLFVEQHKHYLDEIIEQISEFSKRVILADANLDKVLSAYNKHRDKPIREQAENIIHLFTLTNLGAPAAFKYFDTTIDRKRYTSTKEVLDATLIHQSITGLYETRIDLSQLGGDGGSGGSSGGSSGSETPGTSESATPESSGGSSGGSSGGTAPLEEEYRLFLEAPIQNVTLLEQWKREIPKVWAEINPPGLASTQAPIHVQLLSTALPVRVRQYPITLEAKRSLRETIRKFRAAGILRPVHSPWNTPLLPVRKSGTSEYRMVQDLREVNKRVETIHPTVPNPYTLLSLLPPDRIWYSVLDLKDAFFCIPLAPESQLIFAFEWADAEEGESGQLTWTRLPQGFKNSPTLFNEALNRDLQGFRLDHPSVSLLQYVDDLLIAADTQAACLSATRDLLMTLAELGYRVSGKKAQLCQEEVTYLGFKIHKGSRSLSNSRTQAILQIPVPKTKRQVREFLGTIGYCRLWIPGFAELAQPLYAATRPGNDPLVWGEKEEEAFQSLKLALTQPPALALPSLDKPFQLFVEETSGAAKGVLTQALGPWKRPVAYLSKRLDPVAAGWPRCLRAIAAAALLTREASKLTFGQDIEITSSHNLESLLRSPPDKWLTNARITQYQVLLLDPPRVRFKQTAALNPATLLPETDDTLPIHHCLDTLDSLTSTRPDLTDQPLAQAEATLFTDGSSYIRDGKRYAGAAVVTLDSVIWAEPLPIGTSAQKAELIALTKALEWSKDKSVNIYTDSRYAFATLHVHGMIYRERGWLTAGGKAIKNAPEILALLTAVWLPKRVAVMHCKGHQKDDAPTSTGNRRADEVAREVAIRPLSTQATISAGKRTADGSEFEKRTADGSEFESPKKKAKVE

SEQ ID NO: 7722 - protein, 2124 aa, synthetic construct
MPAAKRVKLDGGDKKYSIGLDIGTNSVGWAVITDEYKVPSKKFKVLGNTDRHSIKKNLIGALLFDSGETAEATRLKRTARRRYTRRKNRICYLQEIFSNEMAKVDDSFFHRLEESFLVEEDKKHERHPIFGNIVDEVAYHEKYPTIYHLRKKLVDSTDKADLRLIYLALAHMIKFRGHFLIEGDLNPDNSDVDKLFIQLVQTYNQLFEENPINASGVDAKAILSARLSKSRRLENLIAQLPGEKKNGLFGNLIALSLGLTPNFKSNFDLAEDAKLQLSKDTYDDDLDNLLAQIGDQYADLFLAAKNLSDAILLSDILRVNTEITKAPLSASMIKRYDEHHQDLTLLKALVRQQLPEKYKEIFFDQSKNGYAGYIDGGASQEEFYKFIKPILEKMDGTEELLVKLNREDLLRKQRTFDNGSIPHQIHLGELHAILRRQEDFYPFLKDNREKIEKILTFRIPYYVGPLARGNSRFAWMTRKSEETITPWNFEEVVDKGASAQSFIERMTNFDKNLPNEKVLPKHSLLYEYFTVYNELTKVKYVTEGMRKPAFLSGEQKKAIVDLLFKTNRKVTVKQLKEDYFKKIECFDSVEISGVEDRFNASLGTYHDLLKIIKDKDFLDNEENEDILEDIVLTLTLFEDREMIEERLKTYAHLFDDKVMKQLKRRRYTGWGRLSRKLINGIRDKQSGKTILDFLKSDGFANRNFMQLIHDDSLTFKEDIQKAQVSGQGDSLHEHIANLAGSPAIKKGILQTVKVVDELVKVMGRHKPENIVIEMARENQTTQKGQKNSRERMKRIEEGIKELGSQILKEHPVENTQLQNEKLYLYYLQNGRDMYVDQELDINRLSDYDVDHIVPQSFLKDDSIDNKVLTRSDKARGKSDNVPSEEVVKKMKNYWRQLLNAKLITQRKFDNLTKAERGGLSELDKAGFIKRQLVETRQITKHVAQILDSRMNTKYDENDKLIREVKVITLKSKLVSDFRKDFQFYKVREINNYHHAHDAYLNAVVGTALIKKYPKLESEFVYGDYKVYDVRKMIAKSEQEIGKATAKYFFYSNIMNFFKTEITLANGEIRKRPLIETNGETGEIVWDKGRDFATVRKVLSMPQVNIVKKTEVQTGGFSKESILPKRNSDKLIARKKDWDPKKYGGFDSPTVAYSVLVVAKVEKGKSKKLKSVKELLGITIMERSSFEKNPIDFLEAKGYKEVKKDLIIKLPKYSLFELENGRKRMLASAGELQKGNELALPSKYVNFLYLASHYEKLKGSPEDNEQKQLFVEQHKHYLDEIIEQISEFSKRVILADANLDKVLSAYNKHRDKPIREQAENIIHLFTLTNLGAPAAFKYFDTTIDRKRYTSTKEVLDATLIHQSITGLYETRIDLSQLGGDGGSGGSSGGSSGSETPGTSESATPESSGGSSGGSSGGTVSLQDEHRLFDIPVTTSLPDVWLQDFPQAWAETGGLGRAKCQAPIIIDLKPTAVPVSIKQYPMSLEAHMGIRQHIIKFLELGVLRPCRSPWNTPLLPVKKPGTQDYRPVQDLREINKRTVDIHPTVPNPYNLLSTLKPDYSWYTVLDLKDAFFCLPLAPQSQELFAFEWKDPERGISGQLTWTRLPQGFKNSPTLFDEALHRDLTDFRTQHPEVTLLQYVDDLLLAAPTKKACTQGTRHLLQELGEKGYRASAKKAQICQTKVTYLGYILSEGKRWLTPGRIETVARIPPPRNPREVREFLGTAGFCRLWIPGFAELAAPLYALTKESTPFTWQTEHQLAFEALKKALLSAPALGLPDTSKPFTLFLDERQGIAKGVLTQKLGPWKRPVAYLSKKLDPVAAGWPPCLRIMAATAMLVKDSAKLTLGQPLTVITPHTLEAIVRQPPDRWITNARLTHYQALLLDTDRVQFGPPVTLNPATLLPVPENQPSPHDCRQVLAETHGTREDLKDQELPDADHTWYTDGSSYLDSGTRRAGAAVVDGHNTIWAQSLPPGTSAQKAELIALTKALELSKGKKANIYTDSRYAFATAHTHGSIYERRGLLTSEGKEIKNKAEIIALLKALFLPQEVAIIHCPGHQKGQDPVAVGNRQADRVARQAAMAEVLTLATEPDNTSHITAGKRTADGSEFEKRTADGSEFESPKKKAKVE

SEQ ID NO: 7723 - protein, 2124 aa, synthetic construct
MPAAKRVKLDGGDKKYSIGLDIGTNSVGWAVITDEYKVPSKKFKVLGNTDRHSIKKNLIGALLFDSGETAEATRLKRTARRRYTRRKNRICYLQEIFSNEMAKVDDSFFHRLEESFLVEEDKKHERHPIFGNIVDEVAYHEKYPTIYHLRKKLVDSTDKADLRLIYLALAHMIKFRGHFLIEGDLNPDNSDVDKLFIQLVQTYNQLFEENPINASGVDAKAILSARLSKSRRLENLIAQLPGEKKNGLFGNLIALSLGLTPNFKSNFDLAEDAKLQLSKDTYDDDLDNLLAQIGDQYADLFLAAKNLSDAILLSDILRVNTEITKAPLSASMIKRYDEHHQDLTLLKALVRQQLPEKYKEIFFDQSKNGYAGYIDGGASQEEFYKFIKPILEKMDGTEELLVKLNREDLLRKQRTFDNGSIPHQIHLGELHAILRRQEDFYPFLKDNREKIEKILTFRIPYYVGPLARGNSRFAWMTRKSEETITPWNFEEVVDKGASAQSFIERMTNFDKNLPNEKVLPKHSLLYEYFTVYNELTKVKYVTEGMRKPAFLSGEQKKAIVDLLFKTNRKVTVKQLKEDYFKKIECFDSVEISGVEDRFNASLGTYHDLLKIIKDKDFLDNEENEDILEDIVLTLTLFEDREMIEERLKTYAHLFDDKVMKQLKRRRYTGWGRLSRKLINGIRDKQSGKTILDFLKSDGFANRNFMQLIHDDSLTFKEDIQKAQVSGQGDSLHEHIANLAGSPAIKKGILQTVKVVDELVKVMGRHKPENIVIEMARENQTTQKGQKNSRERMKRIEEGIKELGSQILKEHPVENTQLQNEKLYLYYLQNGRDMYVDQELDINRLSDYDVDHIVPQSFLKDDSIDNKVLTRSDKARGKSDNVPSEEVVKKMKNYWRQLLNAKLITQRKFDNLTKAERGGLSELDKAGFIKRQLVETRQITKHVAQILDSRMNTKYDENDKLIREVKVITLKSKLVSDFRKDFQFYKVREINNYHHAHDAYLNAVVGTALIKKYPKLESEFVYGDYKVYDVRKMIAKSEQEIGKATAKYFFYSNIMNFFKTEITLANGEIRKRPLIETNGETGEIVWDKGRDFATVRKVLSMPQVNIVKKTEVQTGGFSKESILPKRNSDKLIARKKDWDPKKYGGFDSPTVAYSVLVVAKVEKGKSKKLKSVKELLGITIMERSSFEKNPIDFLEAKGYKEVKKDLIIKLPKYSLFELENGRKRMLASAGELQKGNELALPSKYVNFLYLASHYEKLKGSPEDNEQKQLFVEQHKHYLDEIIEQISEFSKRVILADANLDKVLSAYNKHRDKPIREQAENIIHLFTLTNLGAPAAFKYFDTTIDRKRYTSTKEVLDATLIHQSITGLYETRIDLSQLGGDGGSGGSSGGSSGSETPGTSESATPESSGGSSGGSSGGTVSLQDEHRLFDIPVTTSLPDVWLQDFPQAWAETGGLGRAKCQAPIIIDLKPTAVPVSIKQYPMSLEAHMGIRQHIIKFLELGVLRPCRSPWNTPLLPVKKPGTQDYRPVQDLREINKRTVDIHPTVPNPYNLLSTLKPDYSWYTVLDLKDAFFCLPLAPQSQELFAFEWKDPERGISGQLTWTRLPQGFKNSPTLFNEALHRDLTDFRTQHPEVTLLQYVDDLLLAAPTKKACTQGTRHLLQELGEKGYRASAKKAQICQTKVTYLGYILSEGKRWLTPGRIETVARIPPPRNPREVREFLGTAGFCRLWIPGFAELAAPLYALTKPSTPFTWQTEHQLAFEALKKALLSAPALGLPDTSKPFTLFLDERQGIAKGVLTQKLGPWKRPVAYLSKKLDPVAAGWPPCLRIMAATAMLVKDSAKLTLGQPLTVITPHTLEAIVRQPPDRWITNARLTHYQALLLDTDRVQFGPPVTLNPATLLPVPENQPSPHDCRQVLAETHGTREDLKDQELPDADHTWYTDGSSYLDSGTRRAGAAVVDGHNTIWAQSLPPGTSAQKAELIALTKALELSKGKKANIYTDSRYAFATAHTHGSIYERRGWLTSEGKEIKNKAEIIALLKALFLPQEVAIIHCPGHQKGQDPVAVGNRQADRVARQAAMAEVLTLATEPDNTSHITAGKRTADGSEFEKRTADGSEFESPKKKAKVE

SEQ ID NO: 7724 - protein, 2109 aa, synthetic construct
MPAAKRVKLDGGDKKYSIGLDIGTNSVGWAVITDEYKVPSKKFKVLGNTDRHSIKKNLIGALLFDSGETAEATRLKRTARRRYTRRKNRICYLQEIFSNEMAKVDDSFFHRLEESFLVEEDKKHERHPIFGNIVDEVAYHEKYPTIYHLRKKLVDSTDKADLRLIYLALAHMIKFRGHFLIEGDLNPDNSDVDKLFIQLVQTYNQLFEENPINASGVDAKAILSARLSKSRRLENLIAQLPGEKKNGLFGNLIALSLGLTPNFKSNFDLAEDAKLQLSKDTYDDDLDNLLAQIGDQYADLFLAAKNLSDAILLSDILRVNTEITKAPLSASMIKRYDEHHQDLTLLKALVRQQLPEKYKEIFFDQSKNGYAGYIDGGASQEEFYKFIKPILEKMDGTEELLVKLNREDLLRKQRTFDNGSIPHQIHLGELHAILRRQEDFYPFLKDNREKIEKILTFRIPYYVGPLARGNSRFAWMTRKSEETITPWNFEEVVDKGASAQSFIERMTNFDKNLPNEKVLPKHSLLYEYFTVYNELTKVKYVTEGMRKPAFLSGEQKKAIVDLLFKTNRKVTVKQLKEDYFKKIECFDSVEISGVEDRFNASLGTYHDLLKIIKDKDFLDNEENEDILEDIVLTLTLFEDREMIEERLKTYAHLFDDKVMKQLKRRRYTGWGRLSRKLINGIRDKQSGKTILDFLKSDGFANRNFMQLIHDDSLTFKEDIQKAQVSGQGDSLHEHIANLAGSPAIKKGILQTVKVVDELVKVMGRHKPENIVIEMARENQTTQKGQKNSRERMKRIEEGIKELGSQILKEHPVENTQLQNEKLYLYYLQNGRDMYVDQELDINRLSDYDVDHIVPQSFLKDDSIDNKVLTRSDKARGKSDNVPSEEVVKKMKNYWRQLLNAKLITQRKFDNLTKAERGGLSELDKAGFIKRQLVETRQITKHVAQILDSRMNTKYDENDKLIREVKVITLKSKLVSDFRKDFQFYKVREINNYHHAHDAYLNAVVGTALIKKYPKLESEFVYGDYKVYDVRKMIAKSEQEIGKATAKYFFYSNIMNFFKTEITLANGEIRKRPLIETNGETGEIVWDKGRDFATVRKVLSMPQVNIVKKTEVQTGGFSKESILPKRNSDKLIARKKDWDPKKYGGFDSPTVAYSVLVVAKVEKGKSKKLKSVKELLGITIMERSSFEKNPIDFLEAKGYKEVKKDLIIKLPKYSLFELENGRKRMLASAGELQKGNELALPSKYVNFLYLASHYEKLKGSPEDNEQKQLFVEQHKHYLDEIIEQISEFSKRVILADANLDKVLSAYNKHRDKPIREQAENIIHLFTLTNLGAPAAFKYFDTTIDRKRYTSTKEVLDATLIHQSITGLYETRIDLSQLGGDGGSGGSSGGSSGSETPGTSESATPESSGGSSGGSSGGVPWILKKPLELTIKLDLEEQQGTLLNNSILSKKGKEELKQLFEKYSALWQSWENQVGHRRIRPHKIATGTVKPTPQKQYHINPKAKPDIQIVINDLLKQGVLIQKESTMNTPVYPVPKPNGRWRMVLDYRAVNKVTPLIAVQNQHSYGILGSLFKGRYKTTIDLSNGFWAHPIVPEDYWITAFTWQGKQYCWTVLPQGFLNSPGLFTGDVVDLLQGIPNVEVYVDDVYISHDSEKEHLEYLDILFNRLKEAGYIISLKKSNIANSIVDFLGFQITNEGRGLTDTFKEKLENITAPTTLKQLQSILGLLNFARNFIPDFTELIAPLYALIPKSTKNYVPWQIEHSTTLETLITKLNGAEYLQGRKGDKTLIMKVNASYTTGYIRYYNEGEKKPISYVSIVFSKTELKFTELEKLLTTVHKGLLKALDLSMGQNIHVYSPIVSMQNIQKTPQTAKKALASRWLSWLSYLEDPRIRFFYDPQMPALKDLPAVDTGKDNKKHPSNFQHIFYTDGSAITSPTKEGHLNAGMGIVYFINKDGNLQKQQEWSISLGNHTAQFAEIAAFEFALKKCLPLGGNILVVTDSNYVAKAYNEELDVWASNGFVNNRKKPLKHISKWKSVADLKRLRPDVVVTHEPGHQKLDSSPHAYGNNLADQLATQASFKVHAGKRTADGSEFEKRTADGSEFESPKKKAKVE

SEQ ID NO: 7725 - protein, 2109 aa, synthetic construct
MPAAKRVKLDGGDKKYSIGLDIGTNSVGWAVITDEYKVPSKKFKVLGNTDRHSIKKNLIGALLFDSGETAEATRLKRTARRRYTRRKNRICYLQEIFSNEMAKVDDSFFHRLEESFLVEEDKKHERHPIFGNIVDEVAYHEKYPTIYHLRKKLVDSTDKADLRLIYLALAHMIKFRGHFLIEGDLNPDNSDVDKLFIQLVQTYNQLFEENPINASGVDAKAILSARLSKSRRLENLIAQLPGEKKNGLFGNLIALSLGLTPNFKSNFDLAEDAKLQLSKDTYDDDLDNLLAQIGDQYADLFLAAKNLSDAILLSDILRVNTEITKAPLSASMIKRYDEHHQDLTLLKALVRQQLPEKYKEIFFDQSKNGYAGYIDGGASQEEFYKFIKPILEKMDGTEELLVKLNREDLLRKQRTFDNGSIPHQIHLGELHAILRRQEDFYPFLKDNREKIEKILTFRIPYYVGPLARGNSRFAWMTRKSEETITPWNFEEVVDKGASAQSFIERMTNFDKNLPNEKVLPKHSLLYEYFTVYNELTKVKYVTEGMRKPAFLSGEQKKAIVDLLFKTNRKVTVKQLKEDYFKKIECFDSVEISGVEDRFNASLGTYHDLLKIIKDKDFLDNEENEDILEDIVLTLTLFEDREMIEERLKTYAHLFDDKVMKQLKRRRYTGWGRLSRKLINGIRDKQSGKTILDFLKSDGFANRNFMQLIHDDSLTFKEDIQKAQVSGQGDSLHEHIANLAGSPAIKKGILQTVKVVDELVKVMGRHKPENIVIEMARENQTTQKGQKNSRERMKRIEEGIKELGSQILKEHPVENTQLQNEKLYLYYLQNGRDMYVDQELDINRLSDYDVDHIVPQSFLKDDSIDNKVLTRSDKARGKSDNVPSEEVVKKMKNYWRQLLNAKLITQRKFDNLTKAERGGLSELDKAGFIKRQLVETRQITKHVAQILDSRMNTKYDENDKLIREVKVITLKSKLVSDFRKDFQFYKVREINNYHHAHDAYLNAVVGTALIKKYPKLESEFVYGDYKVYDVRKMIAKSEQEIGKATAKYFFYSNIMNFFKTEITLANGEIRKRPLIETNGETGEIVWDKGRDFATVRKVLSMPQVNIVKKTEVQTGGFSKESILPKRNSDKLIARKKDWDPKKYGGFDSPTVAYSVLVVAKVEKGKSKKLKSVKELLGITIMERSSFEKNPIDFLEAKGYKEVKKDLIIKLPKYSLFELENGRKRMLASAGELQKGNELALPSKYVNFLYLASHYEKLKGSPEDNEQKQLFVEQHKHYLDEIIEQISEFSKRVILADANLDKVLSAYNKHRDKPIREQAENIIHLFTLTNLGAPAAFKYFDTTIDRKRYTSTKEVLDATLIHQSITGLYETRIDLSQLGGDGGSGGSSGGSSGSETPGTSESATPESSGGSSGGSSGGVPWLTQQPLQLTILVPLQEYQEKILSKTALPEDQKQQLKTLFVKYDNLWQHWENQVGHRKIRPHNIATGDYPPRPQKQYPINPKAKPSIQIVIDDLLKQGVLTPQNSTMNTPVYPVPKPDGRWRMVLDYREVNKTIPLTAAQNQHSAGILATIVRQKYKTTLDLANGFWAHPITPESYWLTAFTWQGKQYCWTRLPQGFLNSPALFNADVVDLLKEIPNVQVYVDDIYLSHDDPKEHVQQLEKVFQILLQAGYVVSLKKSEIGQKTVEFLGFNITKEGRGLTDTFKTKLLNITPPKDLKQLQSILGLLNFARNFIPNFAELVQPLYNLIAPAKGKYIEWSEENTKQLNMVIEALNTASNLEERLPEQRLVIKVNTSPSAGYVRYYNETGKKPIMYLNYVFSKAELKFSMLEKLLTTMHKALIKAMDLAMGQEILVYSPIVSMTKIQKTPLPERKALPIRWITWMTYLEDPRIQFHYDKTLPELKHIPDVYTSSQSPVKHPSQYEGVFYTDGSAIKSPDPTKSNNAGMGIVHATYKPEYQVLNQWSIPLGNHTAQMAEIAAVEFACKKALKIPGPVLVITDSFYVAESANKELPYWKSNGFVNNKKKPLKHISKWKSIAECLSMKPDITIQHEKGISLQIPVFILKGNALADKLATQGSYVVNAGKRTADGSEFEKRTADGSEFESPKKKAKVE

SEQ ID NO: 7726 - protein, 2198 aa, synthetic construct
MPAAKRVKLDGGDKKYSIGLDIGTNSVGWAVITDEYKVPSKKFKVLGNTDRHSIKKNLIGALLFDSGETAEATRLKRTARRRYTRRKNRICYLQEIFSNEMAKVDDSFFHRLEESFLVEEDKKHERHPIFGNIVDEVAYHEKYPTIYHLRKKLVDSTDKADLRLIYLALAHMIKFRGHFLIEGDLNPDNSDVDKLFIQLVQTYNQLFEENPINASGVDAKAILSARLSKSRRLENLIAQLPGEKKNGLFGNLIALSLGLTPNFKSNFDLAEDAKLQLSKDTYDDDLDNLLAQIGDQYADLFLAAKNLSDAILLSDILRVNTEITKAPLSASMIKRYDEHHQDLTLLKALVRQQLPEKYKEIFFDQSKNGYAGYIDGGASQEEFYKFIKPILEKMDGTEELLVKLNREDLLRKQRTFDNGSIPHQIHLGELHAILRRQEDFYPFLKDNREKIEKILTFRIPYYVGPLARGNSRFAWMTRKSEETITPWNFEEVVDKGASAQSFIERMTNFDKNLPNEKVLPKHSLLYEYFTVYNELTKVKYVTEGMRKPAFLSGEQKKAIVDLLFKTNRKVTVKQLKEDYFKKIECFDSVEISGVEDRFNASLGTYHDLLKIIKDKDFLDNEENEDILEDIVLTLTLFEDREMIEERLKTYAHLFDDKVMKQLKRRRYTGWGRLSRKLINGIRDKQSGKTILDFLKSDGFANRNFMQLIHDDSLTFKEDIQKAQVSGQGDSLHEHIANLAGSPAIKKGILQTVKVVDELVKVMGRHKPENIVIEMARENQTTQKGQKNSRERMKRIEEGIKELGSQILKEHPVENTQLQNEKLYLYYLQNGRDMYVDQELDINRLSDYDVDHIVPQSFLKDDSIDNKVLTRSDKARGKSDNVPSEEVVKKMKNYWRQLLNAKLITQRKFDNLTKAERGGLSELDKAGFIKRQLVETRQITKHVAQILDSRMNTKYDENDKLIREVKVITLKSKLVSDFRKDFQFYKVREINNYHHAHDAYLNAVVGTALIKKYPKLESEFVYGDYKVYDVRKMIAKSEQEIGKATAKYFFYSNIMNFFKTEITLANGEIRKRPLIETNGETGEIVWDKGRDFATVRKVLSMPQVNIVKKTEVQTGGFSKESILPKRNSDKLIARKKDWDPKKYGGFDSPTVAYSVLVVAKVEKGKSKKLKSVKELLGITIMERSSFEKNPIDFLEAKGYKEVKKDLIIKLPKYSLFELENGRKRMLASAGELQKGNELALPSKYVNFLYLASHYEKLKGSPEDNEQKQLFVEQHKHYLDEIIEQISEFSKRVILADANLDKVLSAYNKHRDKPIREQAENIIHLFTLTNLGAPAAFKYFDTTIDRKRYTSTKEVLDATLIHQSITGLYETRIDLSQLGGDGGSGGSSGGSSGSETPGTSESATPESSGGSSGGSSGGMNPLQLLQPLPAEIKGTKLLAHWNSGATITCIPESFLEDEQPIKKTLIKTIHGEKQQNVYYVTFKVKGRKVEAEVIASPYEYILLSPTDVPWLTQQPLQLTILVPLQEYQEKILSKTALPEDQKQQLKTLFVKYDNLWQHWENQVGHRKIRPHNIATGDYPPRPQKQYPINPKAKPSIQIVIDDLLKQGVLTPQNSTMNTPVYPVPKPDGRWRMVLDYREVNKTIPLTAAQNQHSAGILATIVRQKYKTTLDLANGFWAHPITPESYWLTAFTWQGKQYCWTRLPQGFLNSPALFNADVVDLLKEIPNVQVYVDDIYLSHDDPKEHVQQLEKVFQILLQAGYVVSLKKSEIGQKTVEFLGFNITKEGRGLTDTFKTKLLNITPPKDLKQLQSILGLLNFARNFIPNFAELVQPLYNLIAPAKGKYIEWSEENTKQLNMVIEALNTASNLEERLPEQRLVIKVNTSPSAGYVRYYNETGKKPIMYLNYVFSKAELKFSMLEKLLTTMHKALIKAMDLAMGQEILVYSPIVSMTKIQKTPLPERKALPIRWITWMTYLEDPRIQFHYDKTLPELKHIPDVYTSSQSPVKHPSQYEGVFYTDGSAIKSPDPTKSNNAGMGIVHATYKPEYQVLNQWSIPLGNHTAQMAEIAAVEFACKKALKIPGPVLVITDSFYVAESANKELPYWKSNGFVNNKKKPLKHISKWKSIAECLSMKPDITIQHEKGISLQIPVFILKGNALADKLATQGSYVVNAGKRTADGSEFEKRTADGSEFESPKKKAKVE

SEQ ID NO: 7727 - protein, 2149 aa, synthetic construct
MPAAKRVKLDGGDKKYSIGLDIGTNSVGWAVITDEYKVPSKKFKVLGNTDRHSIKKNLIGALLFDSGETAEATRLKRTARRRYTRRKNRICYLQEIFSNEMAKVDDSFFHRLEESFLVEEDKKHERHPIFGNIVDEVAYHEKYPTIYHLRKKLVDSTDKADLRLIYLALAHMIKFRGHFLIEGDLNPDNSDVDKLFIQLVQTYNQLFEENPINASGVDAKAILSARLSKSRRLENLIAQLPGEKKNGLFGNLIALSLGLTPNFKSNFDLAEDAKLQLSKDTYDDDLDNLLAQIGDQYADLFLAAKNLSDAILLSDILRVNTEITKAPLSASMIKRYDEHHQDLTLLKALVRQQLPEKYKEIFFDQSKNGYAGYIDGGASQEEFYKFIKPILEKMDGTEELLVKLNREDLLRKQRTFDNGSIPHQIHLGELHAILRRQEDFYPFLKDNREKIEKILTFRIPYYVGPLARGNSRFAWMTRKSEETITPWNFEEVVDKGASAQSFIERMTNFDKNLPNEKVLPKHSLLYEYFTVYNELTKVKYVTEGMRKPAFLSGEQKKAIVDLLFKTNRKVTVKQLKEDYFKKIECFDSVEISGVEDRFNASLGTYHDLLKIIKDKDFLDNEENEDILEDIVLTLTLFEDREMIEERLKTYAHLFDDKVMKQLKRRRYTGWGRLSRKLINGIRDKQSGKTILDFLKSDGFANRNFMQLIHDDSLTFKEDIQKAQVSGQGDSLHEHIANLAGSPAIKKGILQTVKVVDELVKVMGRHKPENIVIEMARENQTTQKGQKNSRERMKRIEEGIKELGSQILKEHPVENTQLQNEKLYLYYLQNGRDMYVDQELDINRLSDYDVDHIVPQSFLKDDSIDNKVLTRSDKARGKSDNVPSEEVVKKMKNYWRQLLNAKLITQRKFDNLTKAERGGLSELDKAGFIKRQLVETRQITKHVAQILDSRMNTKYDENDKLIREVKVITLKSKLVSDFRKDFQFYKVREINNYHHAHDAYLNAVVGTALIKKYPKLESEFVYGDYKVYDVRKMIAKSEQEIGKATAKYFFYSNIMNFFKTEITLANGEIRKRPLIETNGETGEIVWDKGRDFATVRKVLSMPQVNIVKKTEVQTGGFSKESILPKRNSDKLIARKKDWDPKKYGGFDSPTVAYSVLVVAKVEKGKSKKLKSVKELLGITIMERSSFEKNPIDFLEAKGYKEVKKDLIIKLPKYSLFELENGRKRMLASAGELQKGNELALPSKYVNFLYLASHYEKLKGSPEDNEQKQLFVEQHKHYLDEIIEQISEFSKRVILADANLDKVLSAYNKHRDKPIREQAENIIHLFTLTNLGAPAAFKYFDTTIDRKRYTSTKEVLDATLIHQSITGLYETRIDLSQLGGDGGSGGSSGGSSGSETPGTSESATPESSGGSSGGSSGGLLGRDLLTKLKAQIQFSTEGPQVTWEDRPAMCLVLNLEEEYRLHEKPVPPSIDPSWLQLFPMVWAEKAGMGLANQVPPVVVELKSDASPVAVRQYPMSKEAREGIRPHIQRFLDLGILVPCQSPWNTPLLPVKKPGTNDYRPVQDLREVNKRVQDIHPTVPNPYNLLSSLPPSHTWYSVLDLKDAFFCLKLHPNSQPLFAFEWRDPEKGNTGQLTWTRLPQGFKNSPTLFDEALHRDLASFRALNPQVVMLQYVDDLLVAAPTYRDCKEGTRRLLQELSKLGYRVSAKKAQLCREEVTYLGYLLKGGKRWLTPARKATVMKIPTPTTPRQVREFLGTAGFCRLWIPGFASLAAPLYPLTREKVPFTWTEAHQEAFGRIKEALLSAPALALPDLTKPFALYVDEKEGVARGVLTQTLGPWRRPVAYLSKKLDPVASGWPTCLKAIAAVALLLKDADKLTLGQNVLVIAPHNLESIVRQPPDRWMTNARMTHYQSLLLNERVSFAPPAILNPATLLPVESDDTPIHICSEILAEETGTRPDLRDQPLPGVPAWYTDGSSFIMDGRRQAGAAIVDNKRTVWASNLPEGTSAQKAELIALTQALRLAEGKSINIYTDSRYAFATAHVHGAIYKQRGLLTSAGKDIKNKEEILALLEAIHLPKRVAIIHCPGHQRGTDPVATGNRKADEAAKQAAQSTRILTETTKNAGKRTADGSEFEKRTADGSEFESPKKKAKVE

SEQ ID NO: 7728 - protein, 2149 aa, synthetic construct
MPAAKRVKLDGGDKKYSIGLDIGTNSVGWAVITDEYKVPSKKFKVLGNTDRHSIKKNLIGALLFDSGETAEATRLKRTARRRYTRRKNRICYLQEIFSNEMAKVDDSFFHRLEESFLVEEDKKHERHPIFGNIVDEVAYHEKYPTIYHLRKKLVDSTDKADLRLIYLALAHMIKFRGHFLIEGDLNPDNSDVDKLFIQLVQTYNQLFEENPINASGVDAKAILSARLSKSRRLENLIAQLPGEKKNGLFGNLIALSLGLTPNFKSNFDLAEDAKLQLSKDTYDDDLDNLLAQIGDQYADLFLAAKNLSDAILLSDILRVNTEITKAPLSASMIKRYDEHHQDLTLLKALVRQQLPEKYKEIFFDQSKNGYAGYIDGGASQEEFYKFIKPILEKMDGTEELLVKLNREDLLRKQRTFDNGSIPHQIHLGELHAILRRQEDFYPFLKDNREKIEKILTFRIPYYVGPLARGNSRFAWMTRKSEETITPWNFEEVVDKGASAQSFIERMTNFDKNLPNEKVLPKHSLLYEYFTVYNELTKVKYVTEGMRKPAFLSGEQKKAIVDLLFKTNRKVTVKQLKEDYFKKIECFDSVEISGVEDRFNASLGTYHDLLKIIKDKDFLDNEENEDILEDIVLTLTLFEDREMIEERLKTYAHLFDDKVMKQLKRRRYTGWGRLSRKLINGIRDKQSGKTILDFLKSDGFANRNFMQLIHDDSLTFKEDIQKAQVSGQGDSLHEHIANLAGSPAIKKGILQTVKVVDELVKVMGRHKPENIVIEMARENQTTQKGQKNSRERMKRIEEGIKELGSQILKEHPVENTQLQNEKLYLYYLQNGRDMYVDQELDINRLSDYDVDHIVPQSFLKDDSIDNKVLTRSDKARGKSDNVPSEEVVKKMKNYWRQLLNAKLITQRKFDNLTKAERGGLSELDKAGFIKRQLVETRQITKHVAQILDSRMNTKYDENDKLIREVKVITLKSKLVSDFRKDFQFYKVREINNYHHAHDAYLNAVVGTALIKKYPKLESEFVYGDYKVYDVRKMIAKSEQEIGKATAKYFFYSNIMNFFKTEITLANGEIRKRPLIETNGETGEIVWDKGRDFATVRKVLSMPQVNIVKKTEVQTGGFSKESILPKRNSDKLIARKKDWDPKKYGGFDSPTVAYSVLVVAKVEKGKSKKLKSVKELLGITIMERSSFEKNPIDFLEAKGYKEVKKDLIIKLPKYSLFELENGRKRMLASAGELQKGNELALPSKYVNFLYLASHYEKLKGSPEDNEQKQLFVEQHKHYLDEIIEQISEFSKRVILADANLDKVLSAYNKHRDKPIREQAENIIHLFTLTNLGAPAAFKYFDTTIDRKRYTSTKEVLDATLIHQSITGLYETRIDLSQLGGDGGSGGSSGGSSGSETPGTSESATPESSGGSSGGSSGGLLGRDLLTKLKAQIQFSTEGPQVTWEDRPAMCLVLNLEEEYRLHEKPVPPSIDPSWLQLFPMVWAEKAGMGLANQVPPVVVELKSDASPVAVRQYPMSKEAREGIRPHIQRFLDLGILVPCQSPWNTPLLPVKKPGTNDYRPVQDLREVNKRVQDIHPTVPNPYNLLSSLPPSHTWYSVLDLKDAFFCLKLHPNSQPLFAFEWRDPEKGNTGQLTWTRLPQGFKNSPTLFNEALHRDLASFRALNPQVVMLQYVDDLLVAAPTYRDCKEGTRRLLQELSKLGYRVSAKKAQLCREEVTYLGYLLKGGKRWLTPARKATVMKIPTPTTPRQVREFLGKAGFCRLFIPGFASLAAPLYPLTRPKVPFTWTEAHQEAFGRIKEALLSAPALALPDLTKPFALYVDEKEGVARGVLTQTLGPWRRPVAYLSKKLDPVASGWPTCLKAIAAVALLLKDADKLTLGQNVLVIAPHNLESIVRQPPDRWMTNARMTHYQSLLLNERVSFAPPAILNPATLLPVESDDTPIHICSEILAEETGTRPDLRDQPLPGVPAWYTDGSSFIMDGRRQAGAAIVDNKRTVWASNLPEGTSAQKAELIALTQALRLAEGKSINIYTDSRYAFATAHVHGAIYKQRGWLTSAGKDIKNKEEILALLEAIHLPKRVAIIHCPGHQRGTDPVATGNRKADEAAKQAAQSTRILTETTKNAGKRTADGSEFEKRTADGSEFESPKKKAKVE

SEQ ID NO: 7729 - protein, 2118 aa, synthetic construct
MPAAKRVKLDGGDKKYSIGLDIGTNSVGWAVITDEYKVPSKKFKVLGNTDRHSIKKNLIGALLFDSGETAEATRLKRTARRRYTRRKNRICYLQEIFSNEMAKVDDSFFHRLEESFLVEEDKKHERHPIFGNIVDEVAYHEKYPTIYHLRKKLVDSTDKADLRLIYLALAHMIKFRGHFLIEGDLNPDNSDVDKLFIQLVQTYNQLFEENPINASGVDAKAILSARLSKSRRLENLIAQLPGEKKNGLFGNLIALSLGLTPNFKSNFDLAEDAKLQLSKDTYDDDLDNLLAQIGDQYADLFLAAKNLSDAILLSDILRVNTEITKAPLSASMIKRYDEHHQDLTLLKALVRQQLPEKYKEIFFDQSKNGYAGYIDGGASQEEFYKFIKPILEKMDGTEELLVKLNREDLLRKQRTFDNGSIPHQIHLGELHAILRRQEDFYPFLKDNREKIEKILTFRIPYYVGPLARGNSRFAWMTRKSEETITPWNFEEVVDKGASAQSFIERMTNFDKNLPNEKVLPKHSLLYEYFTVYNELTKVKYVTEGMRKPAFLSGEQKKAIVDLLFKTNRKVTVKQLKEDYFKKIECFDSVEISGVEDRFNASLGTYHDLLKIIKDKDFLDNEENEDILEDIVLTLTLFEDREMIEERLKTYAHLFDDKVMKQLKRRRYTGWGRLSRKLINGIRDKQSGKTILDFLKSDGFANRNFMQLIHDDSLTFKEDIQKAQVSGQGDSLHEHIANLAGSPAIKKGILQTVKVVDELVKVMGRHKPENIVIEMARENQTTQKGQKNSRERMKRIEEGIKELGSQILKEHPVENTQLQNEKLYLYYLQNGRDMYVDQELDINRLSDYDVDHIVPQSFLKDDSIDNKVLTRSDKARGKSDNVPSEEVVKKMKNYWRQLLNAKLITQRKFDNLTKAERGGLSELDKAGFIKRQLVETRQITKHVAQILDSRMNTKYDENDKLIREVKVITLKSKLVSDFRKDFQFYKVREINNYHHAHDAYLNAVVGTALIKKYPKLESEFVYGDYKVYDVRKMIAKSEQEIGKATAKYFFYSNIMNFFKTEITLANGEIRKRPLIETNGETGEIVWDKGRDFATVRKVLSMPQVNIVKKTEVQTGGFSKESILPKRNSDKLIARKKDWDPKKYGGFDSPTVAYSVLVVAKVEKGKSKKLKSVKELLGITIMERSSFEKNPIDFLEAKGYKEVKKDLIIKLPKYSLFELENGRKRMLASAGELQKGNELALPSKYVNFLYLASHYEKLKGSPEDNEQKQLFVEQHKHYLDEIIEQISEFSKRVILADANLDKVLSAYNKHRDKPIREQAENIIHLFTLTNLGAPAAFKYFDTTIDRKRYTSTKEVLDATLIHQSITGLYETRIDLSQLGGDGGSGGSSGGSSGSETPGTSESATPESSGGSSGGSSGGTLNLEDEYRLYETSAEPEVSPGSTWLSDFPQAWAETGGMGLAVRQAPLIIPLKATSTPVSIKQYPMSQEAKLGIKPHIQRLLDQGILVPCQSPWNTPLLPVKKPGTNDYRPVQDLREVNKRVEDIHPTVPNPYNLLSGLPPSHRWYTVLDLKDAFFCLRLHPTSQPLFAFEWRDPGMGISGQLTWTRLPQGFKNSPTLFNEALHRDLADFRIQHPDLILLQYVDDILLAATSELDCQQGTRALLLTLGNLGYRASAKKAQLCQKQVKYLGYLLKEGQRWLTEARKETVMGQPTPKTPRQLREFLGKAGFCRLFIPGFAEMAAPLYPLTKPGTLFNWGPDQQKAYQEIKQALLTAPALGLPDLTKPFELFVDEKQGYAKGVLTQKLGPWRRPVAYLSKKLDPVAAGWPPCLRMVAAIAVLRKDAGKLTMGQPLVILAPHAVEALVKQPPDRWLSNARMTHYQAMLLDTDRVQFGPVVALNPATLLPLPEEGAPHDCLEILAETHGTRPDLTDQPIPDADHTWYTDGSSFLQEGQRKAGAAVTTETEVIWARALPAGTSAQRAELIALTQALKMAEGKRLNVYTDSRYAFATAHIHGEIYRRRGWLTSEGREIKNKSEILALLKALFLPKRLSIIHCLGHQKGDSAEARGNRLADQAAREAAIKTPPDTSTLLAGKRTADGSEFEKRTADGSEFESPKKKAKVE

SEQ ID NO: 7730 - protein, 2118 aa, synthetic construct
MPAAKRVKLDGGDKKYSIGLDIGTNSVGWAVITDEYKVPSKKFKVLGNTDRHSIKKNLIGALLFDSGETAEATRLKRTARRRYTRRKNRICYLQEIFSNEMAKVDDSFFHRLEESFLVEEDKKHERHPIFGNIVDEVAYHEKYPTIYHLRKKLVDSTDKADLRLIYLALAHMIKFRGHFLIEGDLNPDNSDVDKLFIQLVQTYNQLFEENPINASGVDAKAILSARLSKSRRLENLIAQLPGEKKNGLFGNLIALSLGLTPNFKSNFDLAEDAKLQLSKDTYDDDLDNLLAQIGDQYADLFLAAKNLSDAILLSDILRVNTEITKAPLSASMIKRYDEHHQDLTLLKALVRQQLPEKYKEIFFDQSKNGYAGYIDGGASQEEFYKFIKPILEKMDGTEELLVKLNREDLLRKQRTFDNGSIPHQIHLGELHAILRRQEDFYPFLKDNREKIEKILTFRIPYYVGPLARGNSRFAWMTRKSEETITPWNFEEVVDKGASAQSFIERMTNFDKNLPNEKVLPKHSLLYEYFTVYNELTKVKYVTEGMRKPAFLSGEQKKAIVDLLFKTNRKVTVKQLKEDYFKKIECFDSVEISGVEDRFNASLGTYHDLLKIIKDKDFLDNEENEDILEDIVLTLTLFEDREMIEERLKTYAHLFDDKVMKQLKRRRYTGWGRLSRKLINGIRDKQSGKTILDFLKSDGFANRNFMQLIHDDSLTFKEDIQKAQVSGQGDSLHEHIANLAGSPAIKKGILQTVKVVDELVKVMGRHKPENIVIEMARENQTTQKGQKNSRERMKRIEEGIKELGSQILKEHPVENTQLQNEKLYLYYLQNGRDMYVDQELDINRLSDYDVDHIVPQSFLKDDSIDNKVLTRSDKARGKSDNVPSEEVVKKMKNYWRQLLNAKLITQRKFDNLTKAERGGLSELDKAGFIKRQLVETRQITKHVAQILDSRMNTKYDENDKLIREVKVITLKSKLVSDFRKDFQFYKVREINNYHHAHDAYLNAVVGTALIKKYPKLESEFVYGDYKVYDVRKMIAKSEQEIGKATAKYFFYSNIMNFFKTEITLANGEIRKRPLIETNGETGEIVWDKGRDFATVRKVLSMPQVNIVKKTEVQTGGFSKESILPKRNSDKLIARKKDWDPKKYGGFDSPTVAYSVLVVAKVEKGKSKKLKSVKELLGITIMERSSFEKNPIDFLEAKGYKEVKKDLIIKLPKYSLFELENGRKRMLASAGELQKGNELALPSKYVNFLYLASHYEKLKGSPEDNEQKQLFVEQHKHYLDEIIEQISEFSKRVILADANLDKVLSAYNKHRDKPIREQAENIIHLFTLTNLGAPAAFKYFDTTIDRKRYTSTKEVLDATLIHQSITGLYETRIDLSQLGGDGGSGGSSGGSSGSETPGTSESATPESSGGSSGGSSGGTLNIEDEYRLHETSKEPDVSLGSTWLSDFPQAWAETGGMGLAVRQAPLIIPLKATSTPVSIKQYPMSQEARLGIKPHIQRLLDQGILVPCQSPWNTPLLPVKKPGTNDYRPVQDLREVNKRVEDIHPTVPNPYNLLSGLPPSHQWYTVLDLKDAFFCLRLHPTSQPLFAFEWRDPEMGISGQLTWTRLPQGFKNSPTLFNEALHRDLAGFRIQHPDLILLQYVDDLLLAATSELDCQQGTRALLQTLGDLGYRASAKKAQICQKQVKYLGYLLKEGQRWLTEARKETVMGQPIPKTPRQLREFLGTAGFCRLWIPGFAEMAAPLYPLTKPGTLFNWGPDQQKAFQEIKQALLTAPALGLPDLTKPFELFVDEKQGYAKGVLTQKLGPWRRPVAYLSKKLDPVAAGWPPCLRMVAAIAVLTKDAGKLTMGQPLVILAPHAVEALVKQPPDRWLSNARMTHYQALLLDTDRVQFGPVVALNPATLLPLPEEGLQHDCLDILAEAHGTRSDLMDQPLPDADHTWYTDGSSFLQEGQRKAGAAVTTETEVIWARALPAGTSAQRAELIALTQALKMAEGKKLNVYTDSRYAFATAHIHGEIYRRRGWLTSEGKEIKNKDEILALLKALFLPKRLSIIHCPGHQKGNSAEARGNRMADQAAREVATRETPETSTLLAGKRTADGSEFEKRTADGSEFESPKKKAKVE

SEQ ID NO: 7731 - protein, 2118 aa, synthetic construct
MPAAKRVKLDGGDKKYSIGLDIGTNSVGWAVITDEYKVPSKKFKVLGNTDRHSIKKNLIGALLFDSGETAEATRLKRTARRRYTRRKNRICYLQEIFSNEMAKVDDSFFHRLEESFLVEEDKKHERHPIFGNIVDEVAYHEKYPTIYHLRKKLVDSTDKADLRLIYLALAHMIKFRGHFLIEGDLNPDNSDVDKLFIQLVQTYNQLFEENPINASGVDAKAILSARLSKSRRLENLIAQLPGEKKNGLFGNLIALSLGLTPNFKSNFDLAEDAKLQLSKDTYDDDLDNLLAQIGDQYADLFLAAKNLSDAILLSDILRVNTEITKAPLSASMIKRYDEHHQDLTLLKALVRQQLPEKYKEIFFDQSKNGYAGYIDGGASQEEFYKFIKPILEKMDGTEELLVKLNREDLLRKQRTFDNGSIPHQIHLGELHAILRRQEDFYPFLKDNREKIEKILTFRIPYYVGPLARGNSRFAWMTRKSEETITPWNFEEVVDKGASAQSFIERMTNFDKNLPNEKVLPKHSLLYEYFTVYNELTKVKYVTEGMRKPAFLSGEQKKAIVDLLFKTNRKVTVKQLKEDYFKKIECFDSVEISGVEDRFNASLGTYHDLLKIIKDKDFLDNEENEDILEDIVLTLTLFEDREMIEERLKTYAHLFDDKVMKQLKRRRYTGWGRLSRKLINGIRDKQSGKTILDFLKSDGFANRNFMQLIHDDSLTFKEDIQKAQVSGQGDSLHEHIANLAGSPAIKKGILQTVKVVDELVKVMGRHKPENIVIEMARENQTTQKGQKNSRERMKRIEEGIKELGSQILKEHPVENTQLQNEKLYLYYLQNGRDMYVDQELDINRLSDYDVDHIVPQSFLKDDSIDNKVLTRSDKARGKSDNVPSEEVVKKMKNYWRQLLNAKLITQRKFDNLTKAERGGLSELDKAGFIKRQLVETRQITKHVAQILDSRMNTKYDENDKLIREVKVITLKSKLVSDFRKDFQFYKVREINNYHHAHDAYLNAVVGTALIKKYPKLESEFVYGDYKVYDVRKMIAKSEQEIGKATAKYFFYSNIMNFFKTEITLANGEIRKRPLIETNGETGEIVWDKGRDFATVRKVLSMPQVNIVKKTEVQTGGFSKESILPKRNSDKLIARKKDWDPKKYGGFDSPTVAYSVLVVAKVEKGKSKKLKSVKELLGITIMERSSFEKNPIDFLEAKGYKEVKKDLIIKLPKYSLFELENGRKRMLASAGELQKGNELALPSKYVNFLYLASHYEKLKGSPEDNEQKQLFVEQHKHYLDEIIEQISEFSKRVILADANLDKVLSAYNKHRDKPIREQAENIIHLFTLTNLGAPAAFKYFDTTIDRKRYTSTKEVLDATLIHQSITGLYETRIDLSQLGGDGGSGGSSGGSSGSETPGTSESATPESSGGSSGGSSGGTLNIEDEHRLHETSKEPDVSLGSTWLSDFPQAWAETGGMGLAVRQAPLIIPLKATSTPVSIKQYPMSQEARLGIKPHIQRLLDQGILVPCQSPWNTPLLPVKKPGTNDYRPVQDLREVNKRVEDIHPTVPNPYNLLSGLPPSHQWYTVLDLKDAFFCLRLHPTSQPLFAFEWRDPEMGISGQLTWTRLPQGFKNSPTLFDEALHRDLADFRIQHPDLILLQYVDDLLLAATSELDCQQGTRALLQTLGNLGYRASAKKAQICQKQVKYLGYLLKEGQRWLTEARKETVMGQPTPKTPRQLREFLGTAGFCRLWIPGFAEMAAPLYPLTKTGTLFNWGPDQQKAYQEIKQALLTAPALGLPDLTKPFELFVDEKQGYAKGVLTQKLGPWRRPVAYLSKKLDPVAAGWPPCLRMVAAIAVLTKDAGKLTMGQPLVILAPHAVEALVKQPPDRWLSNARMTHYQALLLDTDRVQFGPVVALNPATLLPLPEEGLQHNCLDILAEAHGTRPDLTDQPLPDADHTWYTDGSSLLQEGQRKAGAAVTTETEVIWAKALPAGTSAQRAELIALTQALKMAEGKKLNVYTDSRYAFATAHIHGEIYRRRGLLTSEGKEIKNKDEILALLKALFLPKRLSIIHCPGHQKGHSAEARGNRMADQAARKAAITETPDTSTLLAGKRTADGSEFEKRTADGSEFESPKKKAKVE

SEQ ID NO: 7732 - protein, 2118 aa, synthetic construct; identical to SEQ ID NO: 7731

SEQ ID NO: 7733 - protein, 2138 aa, synthetic construct
MPAAKRVKLDGGDKKYSIGLDIGTNSVGWAVITDEYKVPSKKFKVLGNTDRHSIKKNLIGALLFDSGETAEATRLKRTARRRYTRRKNRICYLQEIFSNEMAKVDDSFFHRLEESFLVEEDKKHERHPIFGNIVDEVAYHEKYPTIYHLRKKLVDSTDKADLRLIYLALAHMIKFRGHFLIEGDLNPDNSDVDKLFIQLVQTYNQLFEENPINASGVDAKAILSARLSKSRRLENLIAQLPGEKKNGLFGNLIALSLGLTPNFKSNFDLAEDAKLQLSKDTYDDDLDNLLAQIGDQYADLFLAAKNLSDAILLSDILRVNTEITKAPLSASMIKRYDEHHQDLTLLKALVRQQLPEKYKEIFFDQSKNGYAGYIDGGASQEEFYKFIKPILEKMDGTEELLVKLNREDLLRKQRTFDNGSIPHQIHLGELHAILRRQEDFYPFLKDNREKIEKILTFRIPYYVGPLARGNSRFAWMTRKSEETITPWNFEEVVDKGASAQSFIERMTNFDKNLPNEKVLPKHSLLYEYFTVYNELTKVKYVTEGMRKPAFLSGEQKKAIVDLLFKTNRKVTVKQLKEDYFKKIECFDSVEISGVEDRFNASLGTYHDLLKIIKDKDFLDNEENEDILEDIVLTLTLFEDREMIEERLKTYAHLFDDKVMKQLKRRRYTGWGRLSRKLINGIRDKQSGKTILDFLKSDGFANRNFMQLIHDDSLTFKEDIQKAQVSGQGDSLHEHIANLAGSPAIKKGILQTVKVVDELVKVMGRHKPENIVIEMARENQTTQKGQKNSRERMKRIEEGIKELGSQILKEHPVENTQLQNEKLYLYYLQNGRDMYVDQELDINRLSDYDVDHIVPQSFLKDDSIDNKVLTRSDKARGKSDNVPSEEVVKKMKNYWRQLLNAKLITQRKFDNLTKAERGGLSELDKAGFIKRQLVETRQITKHVAQILDSRMNTKYDENDKLIREVKVITLKSKLVSDFRKDFQFYKVREINNYHHAHDAYLNAVVGTALIKKYPKLESEFVYGDYKVYDVRKMIAKSEQEIGKATAKYFFYSNIMNFFKTEITLANGEIRKRPLIETNGETGEIVWDKGRDFATVRKVLSMPQVNIVKKTEVQTGGFSKESILPKRNSDKLIARKKDWDPKKYGGFDSPTVAYSVLVVAKVEKGKSKKLKSVKELLGITIMERSSFEKNPIDFLEAKGYKEVKKDLIIKLPKYSLFELENGRKRMLASAGELQKGNELALPSKYVNFLYLASHYEKLKGSPEDNEQKQLFVEQHKHYLDEIIEQISEFSKRVILADANLDKVLSAYNKHRDKPIREQAENIIHLFTLTNLGAPAAFKYFDTTIDRKRYTSTKEVLDATLIHQSITGLYETRIDLSQLGGDGGSGGSSGGSSGSETPGTSESATPESSGGSSGGSSGGWVQEISDSRPMLHIYLNGRRFLGLLNTGADKTCIAGRDWPANWPIHQTESSLQGLGMACGVARSSQPLRWQHEDKSGIIHPFVIPTLPFTLWGRDIMKDIKVRLMTDSPDDSQDLMIGAIESNLFADQISWKSDQPVWLNQWPLKQEKLQALQQLVTEQLQLGHLEESNSPWNTPVFVIKKKSGKWRLLQDLRAVNATMHDMGALQPGLPSPVAVPKGWEIIIIDLQDCFFNIKLHPEDCKRFAFSVPSPNFKRPYQRFQWKVLPQGMKNSPTLCQKFVDKAILTVRDKYQDSYIVHYMDDILLAHPSRSIVDEILTSMIQALNKHGLVVSTEKIQKYDNLKYLGTHIQGDSVSYQKLQIRTDKLRTLNDFQKLLGNINWIRPFLKLTTGELKPLFEILNGDSNPISTRKLTPEACKALQLMNERLSTARVKRLDLSQPWSLCILKTEYTPTACLWQDGVVEWIHLPHISPKVITPYDIFCTQLIIKGRHRSKELFSKDPDYIVVPYTKVQFDLLLQEKEDWPISLLGFLGEVHFHLPKDPLLTFTLQTAIIFPHMTSTTPLEKGIVIFTDGSANGRSVTYIQGREPIIKENTQNTAQQAEIVAVITAFEEVSQPFNLYTDSKYVTGLFPEIETATLSPRTKIYTELKHLQRLIHKRQEKFYIGHIRGHTGLPGPLAQGNAYADSLTRILTAGKRTADGSEFEKRTADGSEFESPKKKAKVE

SEQ ID NO: 7734 - protein, 2110 aa, synthetic construct
MPAAKRVKLDGGDKKYSIGLDIGTNSVGWAVITDEYKVPSKKFKVLGNTDRHSIKKNLIGALLFDSGETAEATRLKRTARRRYTRRKNRICYLQEIFSNEMAKVDDSFFHRLEESFLVEEDKKHERHPIFGNIVDEVAYHEKYPTIYHLRKKLVDSTDKADLRLIYLALAHMIKFRGHFLIEGDLNPDNSDVDKLFIQLVQTYNQLFEENPINASGVDAKAILSARLSKSRRLENLIAQLPGEKKNGLFGNLIALSLGLTPNFKSNFDLAEDAKLQLSKDTYDDDLDNLLAQIGDQYADLFLAAKNLSDAILLSDILRVNTEITKAPLSASMIKRYDEHHQDLTLLKALVRQQLPEKYKEIFFDQSKNGYAGYIDGGASQEEFYKFIKPILEKMDGTEELLVKLNREDLLRKQRTFDNGSIPHQIHLGELHAILRRQEDFYPFLKDNREKIEKILTFRIPYYVGPLARGNSRFAWMTRKSEETITPWNFEEVVDKGASAQSFIERMTNFDKNLPNEKVLPKHSLLYEYFTVYNELTKVKYVTEGMRKPAFLSGEQKKAIVDLLFKTNRKVTVKQLKEDYFKKIECFDSVEISGVEDRFNASLGTYHDLLKIIKDKDFLDNEENEDILEDIVLTLTLFEDREMIEERLKTYAHLFDDKVMKQLKRRRYTGWGRLSRKLINGIRDKQSGKTILDFLKSDGFANRNFMQLIHDDSLTFKEDIQKAQVSGQGDSLHEHIANLAGSPAIKKGILQTVKVVDELVKVMGRHKPENIVIEMARENQTTQKGQKNSRERMKRIEEGIKELGSQILKEHPVENTQLQNEKLYLYYLQNGRDMYVDQELDINRLSDYDVDHIVPQSFLKDDSIDNKVLTRSDKARGKSDNVPSEEVVKKMKNYWRQLLNAKLITQRKFDNLTKAERGGLSELDKAGFIKRQLVETRQITKHVAQILDSRMNTKYDENDKLIREVKVITLKSKLVSDFRKDFQFYKVREINNYHHAHDAYLNAVVGTALIKKYPKLESEFVYGDYKVYDVRKMIAKSEQEIGKATAKYFFYSNIMNFFKTEITLANGEIRKRPLIETNGETGEIVWDKGRDFATVRKVLSMPQVNIVKKTEVQTGGFSKESILPKRNSDKLIARKKDWDPKKYGGFDSPTVAYSVLVVAKVEKGKSKKLKSVKELLGITIMERSSFEKNPIDFLEAKGYKEVKKDLIIKLPKYSLFELENGRKRMLASAGELQKGNELALPSKYVNFLYLASHYEKLKGSPEDNEQKQLFVEQHKHYLDEIIEQISEFSKRVILADANLDKVLSAYNKHRDKPIREQAENIIHLFTLTNLGAPAAFKYFDTTIDRKRYTSTKEVLDATLIHQSITGLYETRIDLSQLGGDGGSGGSSGGSSGSETPGTSESATPESSGGSSGGSSGGLDDEYRLYSPLVKPDQNIQFWLEQFPQAWAETAGMGLAKQVPPQVIQLKASATPVSVRQYPLSKEAQEGIRPHVQRLIQQGILVPVQSPWNTPLLPVRKPGTNDYRPVQDLREVNKRVQDIHPTVPNPYNLLCALPPQRSWYTVLDLKDAFFCLRLHPTSQPLFAFEWRDPGTGRTGQLTWTRLPQGFKNSPTIFNEALHRDLANFRIQHPQVTLLQYVDDLLLAGATKQDCLEGTKALLLELSDLGYRASAKKAQICRREVTYLGYSLRDGQRWLTEARKKTVVQIPAPTTAKQVREFLGKAGFCRLFIPGFATLAAPLYPLTKPKGEFSWAPEHQKAFDAIKKALLSAPALALPDVTKPFTLYVDERKGVARGVLTQTLGPWRRPVAYLSKKLDPVASGWPVCLKAIAAVAILVKDADKLTLGQNITVIAPHALENIVRQPPDRWMTNARMTHYQSLLLTERVTFAPPAALNPATLLPEETDEPVTHDCHQLLIEETGVRKDLTDIPLTGEVLTWFTDGSSYVVEGKRMAGAAVVDGTRTIWASSLPEGTSAQKAELMALTQALRLAEGKSINIYTDSRYAFATAHVHGAIYKQRGWLTSAGREIKNKEEILSLLEALHLPKRLAIIHCPGHQKAKDPISRGNQMADRVAKQAAQGVNLLPAGKRTADGSEFEKRTADGSEFESPKKKAKVE

SEQ ID NO: 7735 - protein, 2110 aa, synthetic construct; identical to SEQ ID NO: 7734

SEQ ID NO: 7736 - protein, 2109 aa, synthetic construct
MPAAKRVKLDGGDKKYSIGLDIGTNSVGWAVITDEYKVPSKKFKVLGNTDRHSIKKNLIGALLFDSGETAEATRLKRTARRRYTRRKNRICYLQEIFSNEMAKVDDSFFHRLEESFLVEEDKKHERHPIFGNIVDEVAYHEKYPTIYHLRKKLVDSTDKADLRLIYLALAHMIKFRGHFLIEGDLNPDNSDVDKLFIQLVQTYNQLFEENPINASGVDAKAILSARLSKSRRLENLIAQLPGEKKNGLFGNLIALSLGLTPNFKSNFDLAEDAKLQLSKDTYDDDLDNLLAQIGDQYADLFLAAKNLSDAILLSDILRVNTEITKAPLSASMIKRYDEHHQDLTLLKALVRQQLPEKYKEIFFDQSKNGYAGYIDGGASQEEFYKFIKPILEKMDGTEELLVKLNREDLLRKQRTFDNGSIPHQIHLGELHAILRRQEDFYPFLKDNREKIEKILTFRIPYYVGPLARGNSRFAWMTRKSEETITPWNFEEVVDKGASAQSFIERMTNFDKNLPNEKVLPKHSLLYEYFTVYNELTKVKYVTEGMRKPAFLSGEQKKAIVDLLFKTNRKVTVKQLKEDYFKKIECFDSVEISGVEDRFNASLGTYHDLLKIIKDKDFLDNEENEDILEDIVLTLTLFEDREMIEERLKTYAHLFDDKVMKQLKRRRYTGWGRLSRKLINGIRDKQSGKTILDFLKSDGFANRNFMQLIHDDSLTFKEDIQKAQVSGQGDSLHEHIANLAGSPAIKKGILQTVKVVDELVKVMGRHKPENIVIEMARENQTTQKGQKNSRERMKRIEEGIKELGSQILKEHPVENTQLQNEKLYLYYLQNGRDMYVDQELDINRLSDYDVDHIVPQSFLKDDSIDNKVLTRSDKARGKSDNVPSEEVVKKMKNYWRQLLNAKLITQRKFDNLTKAERGGLSELDKAGFIKRQLVETRQITKHVAQILDSRMNTKYDENDKLIREVKVITLKSKLVSDFRKDFQFYKVREINNYHHAHDAYLNAVVGTALIKKYPKLESEFVYGDYKVYDVRKMIAKSEQEIGKATAKYFFYSNIMNFFKTEITLANGEIRKRPLIETNGETGEIVWDKGRDFATVRKVLSMPQVNIVKKTEVQTGGFSKESILPKRNSDKLIARKKDWDPKKYGGFDSPTVAYSVLVVAKVEKGKSKKLKSVKELLGITIMERSSFEKNPIDFLEAKGYKEVKKDLIIKLPKYSLFELENGRKRMLASAGELQKGNELALPSKYVNFLYLASHYEKLKGSPEDNEQKQLFVEQHKHYLDEIIEQISEFSKRVILADANLDKVLSAYNKHRDKPIREQAENIIHLFTLTNLGAPAAFKYFDTTIDRKRYTSTKEVLDATLIHQSITGLYETRIDLSQLGGDGGSGGSSGGSSGSETPGTSESATPESSGGSSGGSSGGVPWLMKKPLQLTVLVPLHEYQERLLQQTALPKEQKELLQKLFLKYDALWQHWENQVGHRRIKPHNIATGTLAPRPQKQYPINPKAKPSIQIVIDDLLKQGVLIQQNSTMNTPVYPVPKPDGKWRMVLDYREVNKTIPLIAAQNQHSAGILSSIYRGKYKTTLDLTNGFWAHPITPESYWLTAFTWQGKQYCWTRLPQGFLNSPALFTADVVDLLKEIPNVQAYVDDIYISHDDPQEHLEQLEKIFSILLNAGYVVSLKKSEIAQREVEFLGFNITKEGRGLTDTFKQKLLNITPPKDLKQLQSILGLLNFARNFIPNYSELVKPLYTIVANANGKFISWTEDNSNQLQHIISVLNQADNLEERNPETRLIIKVNSSPSAGYIRYYNEGSKRPIMYVNYIFSKAEAKFTQTEKLLTTMHKGLIKAMDLAMGQEILVYSPIVSMTKIQRTPLPERKALPVRWITWMTYLEDPRIQFHYDKSLPELQQIPNVTEDVIAKTKHPSEFAMVFYTDGSAIKHPDVNKSHSAGMGIAQVQFIPEYKIVHQWSIPLGDHTAQLAEIAAVEFACKKALKISGPVLIVTDSFYVAESANKELPYWKSNGFLNNKKKPLRHVSKWKSIAECLQLKPDIIIMHEKGHQQPMTTLHTEGNNLADKLATQGSYVVHAGKRTADGSEFEKRTADGSEFESPKKKAKVE

SEQ ID NO: 7737 - protein, 2109 aa, synthetic construct
MPAAKRVKLDGGDKKYSIGLDIGTNSVGWAVITDEYKVPSKKFKVLGNTDRHSIKKNLIGALLFDSGETAEATRLKRTARRRYTRRKNRICYLQEIFSNEMAKVDDSFFHRLEESFLVEEDKKHERHPIFGNIVDEVAYHEKYPTIYHLRKKLVDSTDKADLRLIYLALAHMIKFRGHFLIEGDLNPDNSDVDKLFIQLVQTYNQLFEENPINASGVDAKAILSARLSKSRRLENLIAQLPGEKKNGLFGNLIALSLGLTPNFKSNFDLAEDAKLQLSKDTYDDDLDNLLAQIGDQYADLFLAAKNLSDAILLSDILRVNTEITKAPLSASMIKRYDEHHQDLTLLKALVRQQLPEKYKEIFFDQSKNGYAGYIDGGASQEEFYKFIKPILEKMDGTEELLVKLNREDLLRKQRTFDNGSIPHQIHLGELHAILRRQEDFYPFLKDNREKIEKILTFRIPYYVGPLARGNSRFAWMTRKSEETITPWNFEEVVDKGASAQSFIERMTNFDKNLPNEKVLPKHSLLYEYFTVYNELTKVKYVTEGMRKPAFLSGEQKKAIVDLLFKTNRKVTVKQLKEDYFKKIECFDSVEISGVEDRFNASLGTYHDLLKIIKDKDFLDNEENEDILEDIVLTLTLFEDREMIEERLKTYAHLFDDKVMKQLKRRRYTGWGRLSRKLINGIRDKQSGKTILDFLKSDGFANRNFMQLIHDDSLTFKEDIQKAQVSGQGDSLHEHIANLAGSPAIKKGILQTVKVVDELVKVMGRHKPENIVIEMARENQTTQKGQKNSRERMKRIEEGIKELGSQILKEHPVENTQLQNEKLYLYYLQNGRDMYVDQELDINRLSDYDVDHIVPQSFLKDDSIDNKVLTRSDKARGKSDNVPSEEVVKKMKNYWRQLLNAKLITQRKFDNLTKAERGGLSELDKAGFIKRQLVETRQITKHVAQILDSRMNTKYDENDKLIREVKVITLKSKLVSDFRKDFQFYKVREINNYHHAHDAYLNAVVGTALIKKYPKLESEFVYGDYKVYDVRKMIAKSEQEIGKATAKYFFYSNIMNFFKTEITLANGEIRKRPLIETNGETGEIVWDKGRDFATVRKVLSMPQVNIVKKTEVQTGGFSKESILPKRNSDKLIARKKDWDPKKYGGFDSPTVAYSVLVVAKVEKGKSKKLKSVKELLGITIMERSSFEKNPIDFLEAKGYKEVKKDLIIKLPKYSLFELENGRKRMLASAGELQKGNELALPSKYVNFLYLASHYEKLKGSPEDNEQKQLFVEQHKHYLDEIIEQISEFSKRVILADANLDKVLSAYNKHRDKPIREQAENIIHLFTLTNLGAPAAFKYFDTTIDRKRYTSTKEVLDATLIHQSITGLYETRIDLSQLGGDGGSGGSSGGSSGSETPGTSESATPESSGGSSGGSSGGVPWLMKKPLQLTVLVPLHEYQERLLQQTALPKEQKELLQKLFLKYDALWQHWENQVGHRRIKPHNIATGTLAPRPQKQYPINPKAKPSIQIVIDDLLKQGVLIQQNSTMNTPVYPVPKPDGKWRMVLDYREVNKTIPLIAAQNQHSAGILSSIYRGKYKTTLDLTNGFWAHPITPESYWLTAFTWQGKQYCWTRLPQGFLNSPALFNADVVDLLKEIPNVQAYVDDIYISHDDPQEHLEQLEKIFSILLNAGYVVSLKKSEIAQREVEFLGFNITKEGRGLTDTFKQKLLNITPPKDLKQLQSILGLLNFARNFIPNYSELVKPLYTIVAPANGKFISWTEDNSNQLQHIISVLNQADNLEERNPETRLIIKVNSSPSAGYIRYYNEGSKRPIMYVNYIFSKAEAKFTQTEKLLTTMHKGLIKAMDLAMGQEILVYSPIVSMTKIQRTPLPERKALPVRWITWMTYLEDPRIQFHYDKSLPELQQIPNVTEDVIAKTKHPSEFAMVFYTDGSAIKHPDVNKSHSAGMGIAQVQFIPEYKIVHQWSIPLGDHTAQLAEIAAVEFACKKALKISGPVLIVTDSFYVAESANKELPYWKSNGFLNNKKKPLRHVSKWKSIAECLQLKPDIIIMHEKGHQQPMTTLHTEGNNLADKLATQGSYVVHAGKRTADGSEFEKRTADGSEFESPKKKAKVE

SEQ ID NO: 7738 - protein, 2198 aa, synthetic construct
MPAAKRVKLDGGDKKYSIGLDIGTNSVGWAVITDEYKVPSKKFKVLGNTDRHSIKKNLIGALLFDSGETAEATRLKRTARRRYTRRKNRICYLQEIFSNEMAKVDDSFFHRLEESFLVEEDKKHERHPIFGNIVDEVAYHEKYPTIYHLRKKLVDSTDKADLRLIYLALAHMIKFRGHFLIEGDLNPDNSDVDKLFIQLVQTYNQLFEENPINASGVDAKAILSARLSKSRRLENLIAQLPGEKKNGLFGNLIALSLGLTPNFKSNFDLAEDAKLQLSKDTYDDDLDNLLAQIGDQYADLFLAAKNLSDAILLSDILRVNTEITKAPLSASMIKRYDEHHQDLTLLKALVRQQLPEKYKEIFFDQSKNGYAGYIDGGASQEEFYKFIKPILEKMDGTEELLVKLNREDLLRKQRTFDNGSIPHQIHLGELHAILRRQEDFYPFLKDNREKIEKILTFRIPYYVGPLARGNSRFAWMTRKSEETITPWNFEEVVDKGASAQSFIERMTNFDKNLPNEKVLPKHSLLYEYFTVYNELTKVKYVTEGMRKPAFLSGEQKKAIVDLLFKTNRKVTVKQLKEDYFKKIECFDSVEISGVEDRFNASLGTYHDLLKIIKDKDFLDNEENEDILEDIVLTLTLFEDREMIEERLKTYAHLFDDKVMKQLKRRRYTGWGRLSRKLINGIRDKQSGKTILDFLKSDGFANRNFMQLIHDDSLTFKEDIQKAQVSGQGDSLHEHIANLAGSPAIKKGILQTVKVVDELVKVMGRHKPENIVIEMARENQTTQKGQKNSRERMKRIEEGIKELGSQILKEHPVENTQLQNEKLYLYYLQNGRDMYVDQELDINRLSDYDVDHIVPQSFLKDDSIDNKVLTRSDKARGKSDNVPSEEVVKKMKNYWRQLLNAKLITQRKFDNLTKAERGGLSELDKAGFIKRQLVETRQITKHVAQILDSRMNTKYDENDKLIREVKVITLKSKLVSDFRKDFQFYKVREINNYHHAHDAYLNAVVGTALIKKYPKLESEFVYGDYKVYDVRKMIAKSEQEIGKATAKYFFYSNIMNFFKTEITLANGEIRKRPLIETNGETGEIVWDKGRDFATVRKVLSMPQVNIVKKTEVQTGGFSKESILPKRNSDKLIARKKDWDPKKYGGFDSPTVAYSVLVVAKVEKGKSKKLKSVKELLGITIMERSSFEKNPIDFLEAKGYKEVKKDLIIKLPKYSLFELENGRKRMLASAGELQKGNELALPSKYVNFLYLASHYEKLKGSPEDNEQKQLFVEQHKHYLDEIIEQISEFSKRVILADANLDKVLSAYNKHRDKPIREQAENIIHLFTLTNLGAPAAFKYFDTTIDRKRYTSTKEVLDATLIHQSITGLYETRIDLSQLGGDGGSGGSSGGSSGSETPGTSESATPESSGGSSGGSSGGMDPLQLLQPLEAEIKGTKLKAHWNSGATITCVPEAFLEDERPIQTMLIKTIHGEKQQDVYYLTFKVQGRKVEAEVLASPYDYILLNPSDVPWLMKKPLQLTVLVPLHEYQERLLQQTALPKEQKELLQKLFLKYDALWQHWENQVGHRRIKPHNIATGTLAPRPQKQYPINPKAKPSIQIVIDDLLKQGVLIQQNSTMNTPVYPVPKPDGKWRMVLDYREVNKTIPLIAAQNQHSAGILSSIYRGKYKTTLDLTNGFWAHPITPESYWLTAFTWQGKQYCWTRLPQGFLNSPALFNADVVDLLKEIPNVQAYVDDIYISHDDPQEHLEQLEKIFSILLNAGYVVSLKKSEIAQREVEFLGFNITKEGRGLTDTFKQKLLNITPPKDLKQLQSILGKLNFARNFIPNYSELVKPLYTIVAPANGKFISWTEDNSNQLQHIISVLNQADNLEERNPETRLIIKVNSSPSAGYIRYYNEGSKRPIMYVNYIFSKAEAKFTQTEKLLTTMHKGLIKAMDLAMGQEILVYSPIVSMTKIQRTPLPERKALPVRWITWMTYLEDPRIQFHYDKSLPELQQIPNVTEDVIAKTKHPSEFAMVFYTDGSAIKHPDVNKSHSAGMGIAQVQFIPEYKIVHQWSIPLGDHTAQLAEIAAVEFACKKALKISGPVLIVTDSFYVAESANKELPYWKSNGFLNNKKKPLRHVSKWKSIAECLQLKPDIIIMHEKGHQQPMTTLHTEGNNLADKLATQGSYVVHAGKRTADGSEFEKRTADGSEFESPKKKAKVE

SEQ ID NO: 7739 - protein, 2109 aa, synthetic construct
MPAAKRVKLDGGDKKYSIGLDIGTNSVGWAVITDEYKVPSKKFKVLGNTDRHSIKKNLIGALLFDSGETAEATRLKRTARRRYTRRKNRICYLQEIFSNEMAKVDDSFFHRLEESFLVEEDKKHERHPIFGNIVDEVAYHEKYPTIYHLRKKLVDSTDKADLRLIYLALAHMIKFRGHFLIEGDLNPDNSDVDKLFIQLVQTYNQLFEENPINASGVDAKAILSARLSKSRRLENLIAQLPGEKKNGLFGNLIALSLGLTPNFKSNFDLAEDAKLQLSKDTYDDDLDNLLAQIGDQYADLFLAAKNLSDAILLSDILRVNTEITKAPLSASMIKRYDEHHQDLTLLKALVRQQLPEKYKEIFFDQSKNGYAGYIDGGASQEEFYKFIKPILEKMDGTEELLVKLNREDLLRKQRTFDNGSIPHQIHLGELHAILRRQEDFYPFLKDNREKIEKILTFRIPYYVGPLARGNSRFAWMTRKSEETITPWNFEEVVDKGASAQSFIERMTNFDKNLPNEKVLPKHSLLYEYFTVYNELTKVKYVTEGMRKPAFLSGEQKKAIVDLLFKTNRKVTVKQLKEDYFKKIECFDSVEISGVEDRFNASLGTYHDLLKIIKDKDFLDNEENEDILEDIVLTLTLFEDREMIEERLKTYAHLFDDKVMKQLKRRRYTGWGRLSRKLINGIRDKQSGKTILDFLKSDGFANRNFMQLIHDDSLTFKEDIQKAQVSGQGDSLHEHIANLAGSPAIKKGILQTVKVVDELVKVMGRHKPENIVIEMARENQTTQKGQKNSRERMKRIEEGIKELGSQILKEHPVENTQLQNEKLYLYYLQNGRDMYVDQELDINRLSDYDVDHIVPQSFLKDDSIDNKVLTRSDKARGKSDNVPSEEVVKKMKNYWRQLLNAKLITQRKFDNLTKAERGGLSELDKAGFIKRQLVETRQITKHVAQILDSRMNTKYDENDKLIREVKVITLKSKLVSDFRKDFQFYKVREINNYHHAHDAYLNAVVGTALIKKYPKLESEFVYGDYKVYDVRKMIAKSEQEIGKATAKYFFYSNIMNFFKTEITLANGEIRKRPLIETNGETGEIVWDKGRDFATVRKVLSMPQVNIVKKTEVQTGGFSKESILPKRNSDKLIARKKDWDPKKYGGFDSPTVAYSVLVVAKVEKGKSKKLKSVKELLGITIMERSSFEKNPIDFLEAKGYKEVKKDLIIKLPKYSLFELENGRKRMLASAGELQKGNELALPSKYVNFLYLASHYEKLKGSPEDNEQKQLFVEQHKHYLDEIIEQISEFSKRVILADANLDKVLSAYNKHRDKPIREQAENIIHLFTLTNLGAPAAFKYFDTTIDRKRYTSTKEVLDATLIHQSITGLYETRIDLSQLGGDGGSGGSSGGSSGSETPGTSESATPESSGGSSGGSSGGIPWLMKKPLQLTTLVPLQEYEERLLKQTMLTGSYKEKLQSLFLKYDALWQHWENQVGHRRIKPHHIATGTVNPRPQKQYPINPKAKASIQTVINDLLKQGVLIQQNSIMNTPVYPVPKPDGKWRMVLDYREVNKTIPLIAAQNQHSAGILSSIFRGKYKTTLDLSNGFWAHSITPESYWLTAFTWLGQQYCWTRLPQGFLNSPALFNADVVDLLKEVPNVQVYVDDIYISHDDPREHLEQLEKVFSLLLNAGYVVSLKKSEIAQHEVEFLGFNITKEGRGLTETFKQKLLNITPPRDLKQLQSILGLLNFARNFIPNFSELVKPLYNIIATAPGKYITWTTDNSQQLQNIISMLNSAENLEERNPEVRLIMKVNTSPSAGYIRFYNEFAKRPIMYLNYVYTKAEVKFTNTEKLLTTIHKGLIKALDLGMGQEILVYSPIVSMTKIQKTPLPERKALPIRWITWMSYLEDPRIQFHYDKTLPELQQVPTVTDDIIAKIKHPSEFSMVFYTDGSAIKHPNVNKSHNAGMGIAQVQFKPEFTVINTWSIPLGDHTAQLAEVAAVEFACKKALKIDGPVLIVTDSFYVAESVNKELPYWQSNGFFNNKKKPLKHVSKWKSIADCIQLKPDIIIIHEKGHQPTASTFHTEGNNLADKLATQGSYVVNAGKRTADGSEFEKRTADGSEFESPKKKAKVE

SEQ ID NO: 7740 - protein, 2198 aa, synthetic construct
MPAAKRVKLDGGDKKYSIGLDIGTNSVGWAVITDEYKVPSKKFKVLGNTDRHSIKKNLIGALLFDSGETAEATRLKRTARRRYTRRKNRICYLQEIFSNEMAKVDDSFFHRLEESFLVEEDKKHERHPIFGNIVDEVAYHEKYPTIYHLRKKLVDSTDKADLRLIYLALAHMIKFRGHFLIEGDLNPDNSDVDKLFIQLVQTYNQLFEENPINASGVDAKAILSARLSKSRRLENLIAQLPGEKKNGLFGNLIALSLGLTPNFKSNFDLAEDAKLQLSKDTYDDDLDNLLAQIGDQYADLFLAAKNLSDAILLSDILRVNTEITKAPLSASMIKRYDEHHQDLTLLKALVRQQLPEKYKEIFFDQSKNGYAGYIDGGASQEEFYKFIKPILEKMDGTEELLVKLNREDLLRKQRTFDNGSIPHQIHLGELHAILRRQEDFYPFLKDNREKIEKILTFRIPYYVGPLARGNSRFAWMTRKSEETITPWNFEEVVDKGASAQSFIERMTNFDKNLPNEKVLPKHSLLYEYFTVYNELTKVKYVTEGMRKPAFLSGEQKKAIVDLLFKTNRKVTVKQLKEDYFKKIECFDSVEISGVEDRFNASLGTYHDLLKIIKDKDFLDNEENEDILEDIVLTLTLFEDREMIEERLKTYAHLFDDKVMKQLKRRRYTGWGRLSRKLINGIRDKQSGKTILDFLKSDGFANRNFMQLIHDDSLTFKEDIQKAQVSGQGDSLHEHIANLAGSPAIKKGILQTVKVVDELVKVMGRHKPENIVIEMARENQTTQKGQKNSRERMKRIEEGIKELGSQILKEHPVENTQLQNEKLYLYYLQNGRDMYVDQELDINRLSDYDVDHIVPQSFLKDDSIDNKVLTRSDKARGKSDNVPSEEVVKKMKNYWRQLLNAKLITQRKFDNLTKAERGGLSELDKAGFIKRQLVETRQITKHVAQILDSRMNTKYDENDKLIREVKVITLKSKLVSDFRKDFQFYKVREINNYHHAHDAYLNAVVGTALIKKYPKLESEFVYGDYKVYDVRKMIAKSEQEIGKATAKYFFYSNIMNFFKTEITLANGEIRKRPLIETNGETGEIVWDKGRDFATVRKVLSMPQVNIVKKTEVQTGGFSKESILPKRNSDKLIARKKDWDPKKYGGFDSPTVAYSVLVVAKVEKGKSKKLKSVKELLGITIMERSSFEKNPIDFLEAKGYKEVKKDLIIKLPKYSLFELENGRKRMLASAGELQKGNELALPSKYVNFLYLASHYEKLKGSPEDNEQKQLFVEQHKHYLDEIIEQISEFSKRVILADANLDKVLSAYNKHRDKPIREQAENIIHLFTLTNLGAPAAFKYFDTTIDRKRYTSTKEVLDATLIHQSITGLYETRIDLSQLGGDGGSGGSSGGSSGSETPGTSESATPESSGGSSGGSSGGMDPLQLLQPLEAEIKGTKLKAHWNSGATITCVPQAFLEEEVPIKNIWIKTIHGEKEQPVYYLTFKIQGRKVEAEVISSPYDYILVSPSDIPWLMKKPLQLTTLVPLQEYEERLLKQTMLTGSYKEKLQSLFLKYDALWQHWENQVGHRRIKPHHIATGTVNPRPQKQYPINPKAKASIQTVINDLLKQGVLIQQNSIMNTPVYPVPKPDGKWRMVLDYREVNKTIPLIAAQNQHSAGILSSIFRGKYKTTLDLSNGFWAHSITPESYWLTAFTWLGQQYCWTRLPQGFLNSPALFNADVVDLLKEVPNVQVYVDDIYISHDDPREHLEQLEKVFSLLLNAGYVVSLKKSEIAQHEVEFLGFNITKEGRGLTETFKQKLLNITPPRDLKQLQSILGLLNFARNFIPNFSELVKPLYNIIATAPGKYITWTTDNSQQLQNIISMLNSAENLEERNPEVRLIMKVNTSPSAGYIRFYNEFAKRPIMYLNYVYTKAEVKFTNTEKLLTTIHKGLIKALDLGMGQEILVYSPIVSMTKIQKTPLPERKALPIRWITWMSYLEDPRIQFHYDKTLPELQQVPTVTDDIIAKIKHPSEFSMVFYTDGSAIKHPNVNKSHNAGMGIAQVQFKPEFTVINTWSIPLGDHTAQLAEVAAVEFACKKALKIDGPVLIVTDSFYVAESVNKELPYWQSNGFFNNKKKPLKHVSKWKSIADCIQLKPDIIIIHEKGHQPTASTFHTEGNNLADKLATQGSYVVNAGKRTADGSEFEKRTADGSEFESPKKKAKVE

SEQ ID NO: 7741 - protein, 2116 aa, synthetic construct
MPAAKRVKLDGGDKKYSIGLDIGTNSVGWAVITDEYKVPSKKFKVLGNTDRHSIKKNLIGALLFDSGETAEATRLKRTARRRYTRRKNRICYLQEIFSNEMAKVDDSFFHRLEESFLVEEDKKHERHPIFGNIVDEVAYHEKYPTIYHLRKKLVDSTDKADLRLIYLALAHMIKFRGHFLIEGDLNPDNSDVDKLFIQLVQTYNQLFEENPINASGVDAKAILSARLSKSRRLENLIAQLPGEKKNGLFGNLIALSLGLTPNFKSNFDLAEDAKLQLSKDTYDDDLDNLLAQIGDQYADLFLAAKNLSDAILLSDILRVNTEITKAPLSASMIKRYDEHHQDLTLLKALVRQQLPEKYKEIFFDQSKNGYAGYIDGGASQEEFYKFIKPILEKMDGTEELLVKLNREDLLRKQRTFDNGSIPHQIHLGELHAILRRQEDFYPFLKDNREKIEKILTFRIPYYVGPLARGNSRFAWMTRKSEETITPWNFEEVVDKGASAQSFIERMTNFDKNLPNEKVLPKHSLLYEYFTVYNELTKVKYVTEGMRKPAFLSGEQKKAIVDLLFKTNRKVTVKQLKEDYFKKIECFDSVEISGVEDRFNASLGTYHDLLKIIKDKDFLDNEENEDILEDIVLTLTLFEDREMIEERLKTYAHLFDDKVMKQLKRRRYTGWGRLSRKLINGIRDKQSGKTILDFLKSDGFANRNFMQLIHDDSLTFKEDIQKAQVSGQGDSLHEHIANLAGSPAIKKGILQTVKVVDELVKVMGRHKPENIVIEMARENQTTQKGQKNSRERMKRIEEGIKELGSQILKEHPVENTQLQNEKLYLYYLQNGRDMYVDQELDINRLSDYDVDHIVPQSFLKDDSIDNKVLTRSDKARGKSDNVPSEEVVKKMKNYWRQLLNAKLITQRKFDNLTKAERGGLSELDKAGFIKRQLVETRQITKHVAQILDSRMNTKYDENDKLIREVKVITLKSKLVSDFRKDFQFYKVREINNYHHAHDAYLNAVVGTALIKKYPKLESEFVYGDYKVYDVRKMIAKSEQEIGKATAKYFFYSNIMNFFKTEITLANGEIRKRPLIETNGETGEIVWDKGRDFATVRKVLSMPQVNIVKKTEVQTGGFSKESILPKRNSDKLIARKKDWDPKKYGGFDSPTVAYSVLVVAKVEKGKSKKLKSVKELLGITIMERSSFEKNPIDFLEAKGYKEVKKDLIIKLPKYSLFELENGRKRMLASAGELQKGNELALPSKYVNFLYLASHYEKLKGSPEDNEQKQLFVEQHKHYLDEIIEQISEFSKRVILADANLDKVLSAYNKHRDKPIREQAENIIHLFTLTNLGAPAAFKYFDTTIDRKRYTSTKEVLDATLIHQSITGLYETRIDLSQLGGDGGSGGSSGGSSGSETPGTSESATPESSGGSSGGSSGGVLNLEEEYRLHEKPVPSSIDPSWLQLFPTVWAERAGMGLANQVPPVVVELRSGASPVAVRQYPMSKEAREGIRPHIQRFLDLGVLVPCQSPWNTPLLPVKKPGTNDYRPVQDLREINKRVQDIHPTVPNPYNLLSSLPPSHTWYSVLDLKDAFFCLKLHPNSQPLFAFEWRDPEKGNTGQLTWTRLPQGFKNSPTLFDEALHRDLAPFRALNPQVVLLQYVDDLLVAAPTYRDCKEGTQKLLQELSKLGYRVSAKKAQLCQKEVTYLGYLLKEGKRWLTPARKATVMKIPPPTTPRQVREFLGTAGFCRLWIPGFASLAAPLYPLTKESIPFIWTEEHQKAFDRIKEALLSAPALALPDLTKPFTLYVDERAGVARGVLTQTLGPWRRPVAYLSKKLDPVASGWPTCLKAVAAVALLLKDADKLTLGQNVTVIASHSLESIVRQPPDRWMTNARMTHYQSLLLNERVSFAPPAVLNPATLLPVESEATPVHRCSEILAEETGTRRDLKDQPLPGVPAWYTDGSSFIAEGKRRAGAAIVDGKRTVWASSLPEGTSAQKAELVALTQALRLAEGKDINIYTDSRYAFATAHIHGAIYKQRGLLTSAGKDIKNKEEILALLEAIHLPKRVAIIHCPGHQKGNDPVATGNRRADEAAKQAALSTRVLAETTKPAGKRTADGSEFEKRTADGSEFESPKKKAKVE

SEQ ID NO: 7742 - protein, 2116 aa, synthetic construct
MPAAKRVKLDGGDKKYSIGLDIGTNSVGWAVITDEYKVPSKKFKVLGNTDRHSIKKNLIGALLFDSGETAEATRLKRTARRRYTRRKNRICYLQEIFSNEMAKVDDSFFHRLEESFLVEEDKKHERHPIFGNIVDEVAYHEKYPTIYHLRKKLVDSTDKADLRLIYLALAHMIKFRGHFLIEGDLNPDNSDVDKLFIQLVQTYNQLFEENPINASGVDAKAILSARLSKSRRLENLIAQLPGEKKNGLFGNLIALSLGLTPNFKSNFDLAEDAKLQLSKDTYDDDLDNLLAQIGDQYADLFLAAKNLSDAILLSDILRVNTEITKAPLSASMIKRYDEHHQDLTLLKALVRQQLPEKYKEIFFDQSKNGYAGYIDGGASQEEFYKFIKPILEKMDGTEELLVKLNREDLLRKQRTFDNGSIPHQIHLGELHAILRRQEDFYPFLKDNREKIEKILTFRIPYYVGPLARGNSRFAWMTRKSEETITPWNFEEVVDKGASAQSFIERMTNFDKNLPNEKVLPKHSLLYEYFTVYNELTKVKYVTEGMRKPAFLSGEQKKAIVDLLFKTNRKVTVKQLKEDYFKKIECFDSVEISGVEDRFNASLGTYHDLLKIIKDKDFLDNEENEDILEDIVLTLTLFEDREMIEERLKTYAHLFDDKVMKQLKRRRYTGWGRLSRKLINGIRDKQSGKTILDFLKSDGFANRNFMQLIHDDSLTFKEDIQKAQVSGQGDSLHEHIANLAGSPAIKKGILQTVKVVDELVKVMGRHKPENIVIEMARENQTTQKGQKNSRERMKRIEEGIKELGSQILKEHPVENTQLQNEKLYLYYLQNGRDMYVDQELDINRLSDYDVDHIVPQSFLKDDSIDNKVLTRSDKARGKSDNVPSEEVVKKMKNYWRQLLNAKLITQRKFDNLTKAERGGLSELDKAGFIKRQLVETRQITKHVAQILDSRMNTKYDENDKLIREVKVITLKSKLVSDFRKDFQFYKVREINNYHHAHDAYLNAVVGTALIKKYPKLESEFVYGDYKVYDVRKMIAKSEQEIGKATAKYFFYSNIMNFFKTEITLANGEIRKRPLIETNGETGEIVWDKGRDFATVRKVLSMPQVNIVKKTEVQTGGFSKESILPKRNSDKLIARKKDWDPKKYGGFDSPTVAYSVLVVAKVEKGKSKKLKSVKELLGITIMERSSFEKNPIDFLEAKGYKEVKKDLIIKLPKYSLFELENGRKRMLASAGELQKGNELALPSKYVNFLYLASHYEKLKGSPEDNEQKQLFVEQHKHYLDEIIEQISEFSKRVILADANLDKVLSAYNKHRDKPIREQAENIIHLFTLTNLGAPAAFKYFDTTIDRKRYTSTKEVLDATLIHQSITGLYETRIDLSQLGGDGGSGGSSGGSSGSETPGTSESATPESSGGSSGGSSGGVLNLEEEYRLHEKPVPSSIDPSWLQLFPTVWAERAGMGLANQVPPVVVELRSGASPVAVRQYPMSKEAREGIRPHIQRFLDLGVLVPCQSPWNTPLLPVKKPGTNDYRPVQDLREINKRVQDIHPTVPNPYNLLSSLPPSHTWYSVLDLKDAFFCLKLHPNSQPLFAFEWRDPEKGNTGQLTWTRLPQGFKNSPTLFNEALHRDLAPFRALNPQVVLLQYVDDLLVAAPTYRDCKEGTQKLLQELSKLGYRVSAKKAQLCQKEVTYLGYLLKEGKRWLTPARKATVMKIPPPTTPRQVREFLGTAGFCRLWIPGFASLAAPLYPLTKPSIPFIWTEEHQKAFDRIKEALLSAPALALPDLTKPFTLYVDERAGVARGVLTQTLGPWRRPVAYLSKKLDPVASGWPTCLKAVAAVALLLKDADKLTLGQNVTVIASHSLESIVRQPPDRWMTNARMTHYQSLLLNERVSFAPPAVLNPATLLPVESEATPVHRCSEILAEETGTRRDLKDQPLPGVPAWYTDGSSFIAEGKRRAGAAIVDGKRTVWASSLPEGTSAQKAELVALTQALRLAEGKDINIYTDSRYAFATAHIHGAIYKQRGWLTSAGKDIKNKEEILALLEAIHLPKRVAIIHCPGHQKGNDPVATGNRRADEAAKQAALSTRVLAETTKPAGKRTADGSEFEKRTADGSEFESPKKKAKVE

SEQ ID NO: 7743 - protein, 2116 aa, synthetic construct
MPAAKRVKLDGGDKKYSIGLDIGTNSVGWAVITDEYKVPSKKFKVLGNTDRHSIKKNLIGALLFDSGETAEATRLKRTARRRYTRRKNRICYLQEIFSNEMAKVDDSFFHRLEESFLVEEDKKHERHPIFGNIVDEVAYHEKYPTIYHLRKKLVDSTDKADLRLIYLALAHMIKFRGHFLIEGDLNPDNSDVDKLFIQLVQTYNQLFEENPINASGVDAKAILSARLSKSRRLENLIAQLPGEKKNGLFGNLIALSLGLTPNFKSNFDLAEDAKLQLSKDTYDDDLDNLLAQIGDQYADLFLAAKNLSDAILLSDILRVNTEITKAPLSASMIKRYDEHHQDLTLLKALVRQQLPEKYKEIFFDQSKNGYAGYIDGGASQEEFYKFIKPILEKMDGTEELLVKLNREDLLRKQRTFDNGSIPHQIHLGELHAILRRQEDFYPFLKDNREKIEKILTFRIPYYVGPLARGNSRFAWMTRKSEETITPWNFEEVVDKGASAQSFIERMTNFDKNLPNEKVLPKHSLLYEYFTVYNELTKVKYVTEGMRKPAFLSGEQKKAIVDLLFKTNRKVTVKQLKEDYFKKIECFDSVEISGVEDRFNASLGTYHDLLKIIKDKDFLDNEENEDILEDIVLTLTLFEDREMIEERLKTYAHLFDDKVMKQLKRRRYTGWGRLSRKLINGIRDKQSGKTILDFLKSDGFANRNFMQLIHDDSLTFKEDIQKAQVSGQGDSLHEHIANLAGSPAIKKGILQTVKVVDELVKVMGRHKPENIVIEMARENQTTQKGQKNSRERMKRIEEGIKELGSQILKEHPVENTQLQNEKLYLYYLQNGRDMYVDQELDINRLSDYDVDHIVPQSFLKDDSIDNKVLTRSDKARGKSDNVPSEEVVKKMKNYWRQLLNAKLITQRKFDNLTKAERGGLSELDKAGFIKRQLVETRQITKHVAQILDSRMNTKYDENDKLIREVKVITLKSKLVSDFRKDFQFYKVREINNYHHAHDAYLNAVVGTALIKKYPKLESEFVYGDYKVYDVRKMIAKSEQEIGKATAKYFFYSNIMNFFKTEITLANGEIRKRPLIETNGETGEIVWDKGRDFATVRKVLSMPQVNIVKKTEVQTGGFSKESILPKRNSDKLIARKKDWDPKKYGGFDSPTVAYSVLVVAKVEKGKSKKLKSVKELLGITIMERSSFEKNPIDFLEAKGYKEVKKDLIIKLPKYSLFELENGRKRMLASAGELQKGNELALPSKYVNFLYLASHYEKLKGSPEDNEQKQLFVEQHKHYLDEIIEQISEFSKRVILADANLDKVLSAYNKHRDKPIREQAENIIHLFTLTNLGAPAAFKYFDTTIDRKRYTSTKEVLDATLIHQSITGLYETRIDLSQLGGDGGSGGSSGGSSGSETPGTSESATPESSGGSSGGSSGGVLNLEEEYRLHEKPVPSSIDPSWLQLFPTVWAERAGMGLANQVPPVVVELRSGASPVAVRQYPMSKEAREGIRPHIQRFLDLGVLVPCQSPWNTPLLPVKKPGTNDYRPVQDLREINKRVQDIHPTVPNPYNLLSSLPPSHTWYSVLDLKDAFFCLKLHPNSQPLFAFEWRDPEKGNTGQLTWTRLPQGFKNSPTLFNEALHRDLAPFRALNPQVVLLQYVDDLLVAAPTYRDCKEGTQKLLQELSKLGYRVSAKKAQLCQKEVTYLGYLLKEGKRWLTPARKATVMKIPPPTTPRQVREFLGKAGFCRLFIPGFASLAAPLYPLTKPSIPFIWTEEHQKAFDRIKEALLSAPALALPDLTKPFTLYVDERAGVARGVLTQTLGPWRRPVAYLSKKLDPVASGWPTCLKAVAAVALLLKDADKLTLGQNVTVIASHSLESIVRQPPDRWMTNARMTHYQSLLLNERVSFAPPAVLNPATLLPVESEATPVHRCSEILAEETGTRRDLKDQPLPGVPAWYTDGSSFIAEGKRRAGAAIVDGKRTVWASSLPEGTSAQKAELVALTQALRLAEGKDINIYTDSRYAFATAHIHGAIYKQRGWLTSAGKDIKNKEEILALLEAIHLPKRVAIIHCPGHQKGNDPVATGNRRADEAAKQAALSTRVLAETTKPAGKRTADGSEFEKRTADGSEFESPKKKAKVE

SEQ ID NO: 7744-8000 - skipped (257 entries)

SEQ ID NO: 8001 - protein, 673 aa, Reticuloendotheliosis virus
TAPLEEEYRLFLEAPIQNVTLLEQWKREIPKVWAEINPPGLASTQAPIHVQLLSTALPVRVRQYPITLEAKRSLRETIRKFRAAGILRPVHSPWNTPLLPVRKSGTSEYRMVQDLREVNKRVETIHPTVPNPYTLLSLLPPDRIWYSVLDLKDAFFCIPLAPESQLIFAFEWADAEEGESGQLTWTRLPQGFKNSPTLFDEALNRDLQGFRLDHPSVSLLQYVDDLLIAADTQAACLSATRDLLMTLAELGYRVSGKKAQLCQEEVTYLGFKIHKGSRSLSNSRTQAILQIPVPKTKRQVREFLGTIGYCRLWIPGFAELAQPLYAATRGGNDPLVWGEKEEEAFQSLKLALTQPPALALPSLDKPFQLFVEETSGAAKGVLTQALGPWKRPVAYLSKRLDPVAAGWPRCLRAIAAAALLTREASKLTFGQDIEITSSHNLESLLRSPPDKWLTNARITQYQVLLLDPPRVRFKQTAALNPATLLPETDDTLPIHHCLDTLDSLTSTRPDLTDQPLAQAEATLFTDGSSYIRDGKRYAGAAVVTLDSVIWAEPLPIGTSAQKAELIALTKALEWSKDKSVNIYTDSRYAFATLHVHGMIYRERGLLTAGGKAIKNAPEILALLTAVWLPKRVAVMHCKGHQKDDAPTSTGNRRADEVAREVAIRPLSTQATIS

SEQ ID NO: 8002 - protein, 673 aa, synthetic construct
TAPLEEEYRLFLEAPIQNVTLLEQWKREIPKVWAEINPPGLASTQAPIHVQLLSTALPVRVRQYPITLEAKRSLRETIRKFRAAGILRPVHSPWNTPLLPVRKSGTSEYRMVQDLREVNKRVETIHPTVPNPYTLLSLLPPDRIWYSVLDLKDAFFCIPLAPESQLIFAFEWADAEEGESGQLTWTRLPQGFKNSPTLFNEALNRDLQGFRLDHPSVSLLQYVDDLLIAADTQAACLSATRDLLMTLAELGYRVSGKKAQLCQEEVTYLGFKIHKGSRSLSNSRTQAILQIPVPKTKRQVREFLGTIGYCRLWIPGFAELAQPLYAATRPGNDPLVWGEKEEEAFQSLKLALTQPPALALPSLDKPFQLFVEETSGAAKGVLTQALGPWKRPVAYLSKRLDPVAAGWPRCLRAIAAAALLTREASKLTFGQDIEITSSHNLESLLRSPPDKWLTNARITQYQVLLLDPPRVRFKQTAALNPATLLPETDDTLPIHHCLDTLDSLTSTRPDLTDQPLAQAEATLFTDGSSYIRDGKRYAGAAVVTLDSVIWAEPLPIGTSAQKAELIALTKALEWSKDKSVNIYTDSRYAFATLHVHGMIYRERGWLTAGGKAIKNAPEILALLTAVWLPKRVAVMHCKGHQKDDAPTSTGNRRADEVAREVAIRPLSTQATIS

SEQ ID NO: 8003 - protein, 673 aa, synthetic construct
TAPLEEEYRLFLEAPIQNVTLLEQWKREIPKVWAEINPPGLASTQAPIHVQLLSTALPVRVRQYPITLEAKRSLRETIRKFRAAGILRPVHSPWNTPLLPVRKSGTSEYRMVQDLREVNKRVETIHPTVPNPYTLLSLLPPDRIWYSVLDLKDAFFCIPLAPESQLIFAFEWADAEEGESGQLTWTRLPQGFKNSPTLFNEALNRDLQGFRLDHPSVSLLQYVDDLLIAADTQAACLSATRDLLMTLAELGYRVSGKKAQLCQEEVTYLGFKIHKGSRSLSNSRTQAILQIPVPKTKRQVREFLGKIGYCRLFIPGFAELAQPLYAATRPGNDPLVWGEKEEEAFQSLKLALTQPPALALPSLDKPFQLFVEETSGAAKGVLTQALGPWKRPVAYLSKRLDPVAAGWPRCLRAIAAAALLTREASKLTFGQDIEITSSHNLESLLRSPPDKWLTNARITQYQVLLLDPPRVRFKQTAALNPATLLPETDDTLPIHHCLDTLDSLTSTRPDLTDQPLAQAEATLFTDGSSYIRDGKRYAGAAVVTLDSVIWAEPLPIGTSAQKAELIALTKALEWSKDKSVNIYTDSRYAFATLHVHGMIYRERGWLTAGGKAIKNAPEILALLTAVWLPKRVAVMHCKGHQKDDAPTSTGNRRADEVAREVAIRPLSTQATIS

SEQ ID NO: 8004 - protein, 677 aa, synthetic construct
TVSLQDEHRLFDIPVTTSLPDVWLQDFPQAWAETGGLGRAKCQAPIIIDLKPTAVPVSIKQYPMSLEAHMGIRQHIIKFLELGVLRPCRSPWNTPLLPVKKPGTQDYRPVQDLREINKRTVDIHPTVPNPYNLLSTLKPDYSWYTVLDLKDAFFCLPLAPQSQELFAFEWKDPERGISGQLTWTRLPQGFKNSPTLFDEALHRDLTDFRTQHPEVTLLQYVDDLLLAAPTKKACTQGTRHLLQELGEKGYRASAKKAQICQTKVTYLGYILSEGKRWLTPGRIETVARIPPPRNPREVREFLGTAGFCRLWIPGFAELAAPLYALTKESTPFTWQTEHQLAFEALKKALLSAPALGLPDTSKPFTLFLDERQGIAKGVLTQKLGPWKRPVAYLSKKLDPVAAGWPPCLRIMAATAMLVKDSAKLTLGQPLTVITPHTLEAIVRQPPDRWITNARLTHYQALLLDTDRVQFGPPVTLNPATLLPVPENQPSPHDCRQVLAETHGTREDLKDQELPDADHTWYTDGSSYLDSGTRRAGAAVVDGHNTIWAQSLPPGTSAQKAELIALTKALELSKGKKANIYTDSRYAFATAHTHGSIYERRGLLTSEGKEIKNKAEIIALLKALFLPQEVAIIHCPGHQKGQDPVAVGNRQADRVARQAAMAEVLTLATEPDNTSHIT

SEQ ID NO: 8005 - protein, 677 aa, synthetic construct
TVSLQDEHRLFDIPVTTSLPDVWLQDFPQAWAETGGLGRAKCQAPIIIDLKPTAVPVSIKQYPMSLEAHMGIRQHIIKFLELGVLRPCRSPWNTPLLPVKKPGTQDYRPVQDLREINKRTVDIHPTVPNPYNLLSTLKPDYSWYTVLDLKDAFFCLPLAPQSQELFAFEWKDPERGISGQLTWTRLPQGFKNSPTLFNEALHRDLTDFRTQHPEVTLLQYVDDLLLAAPTKKACTQGTRHLLQELGEKGYRASAKKAQICQTKVTYLGYILSEGKRWLTPGRIETVARIPPPRNPREVREFLGTAGFCRLWIPGFAELAAPLYALTKPSTPFTWQTEHQLAFEALKKALLSAPALGLPDTSKPFTLFLDERQGIAKGVLTQKLGPWKRPVAYLSKKLDPVAAGWPPCLRIMAATAMLVKDSAKLTLGQPLTVITPHTLEAIVRQPPDRWITNARLTHYQALLLDTDRVQFGPPVTLNPATLLPVPENQPSPHDCRQVLAETHGTREDLKDQELPDADHTWYTDGSSYLDSGTRRAGAAVVDGHNTIWAQSLPPGTSAQKAELIALTKALELSKGKKANIYTDSRYAFATAHTHGSIYERRGWLTSEGKEIKNKAEIIALLKALFLPQEVAIIHCPGHQKGQDPVAVGNRQADRVARQAAMAEVLTLATEPDNTSHIT

SEQ ID NO: 8006 - protein, 677 aa, synthetic construct
TVSLQDEHRLFDIPVTTSLPDVWLQDFPQAWAETGGLGRAKCQAPIIIDLKPTAVPVSIKQYPMSLEAHMGIRQHIIKFLELGVLRPCRSPWNTPLLPVKKPGTQDYRPVQDLREINKRTVDIHPTVPNPYNLLSTLKPDYSWYTVLDLKDAFFCLPLAPQSQELFAFEWKDPERGISGQLTWTRLPQGFKNSPTLFNEALHRDLTDFRTQHPEVTLLQYVDDLLLAAPTKKACTQGTRHLLQELGEKGYRASAKKAQICQTKVTYLGYILSEGKRWLTPGRIETVARIPPPRNPREVREFLGKAGFCRLFIPGFAELAAPLYALTKPSTPFTWQTEHQLAFEALKKALLSAPALGLPDTSKPFTLFLDERQGIAKGVLTQKLGPWKRPVAYLSKKLDPVAAGWPPCLRIMAATAMLVKDSAKLTLGQPLTVITPHTLEAIVRQPPDRWITNARLTHYQALLLDTDRVQFGPPVTLNPATLLPVPENQPSPHDCRQVLAETHGTREDLKDQELPDADHTWYTDGSSYLDSGTRRAGAAVVDGHNTIWAQSLPPGTSAQKAELIALTKALELSKGKKANIYTDSRYAFATAHTHGSIYERRGWLTSEGKEIKNKAEIIALLKALFLPQEVAIIHCPGHQKGQDPVAVGNRQADRVARQAAMAEVLTLATEPDNTSHIT

SEQ ID NO: 8007 - protein, 576 aa, Bovine leukemia virus
GVLDAPPSHIGLEHLPPPPEVPQFPLNLERLQALQDLVHRSLEAGYISPWDGPGNNPVFPVRKPNGAWRFVHDLRVTNALTKPIPALSPGPPDLTAIPTHLPHIICLDLKDAFFQIPVEDRFRSYFAFTLPTPGGLQPHRRFAWRVLPQGFINSPALFERALQEPLRQVSAAFSQSLLVSYMDDILYVSPTEEQRLQCYQTMAAHLRDLGFQVASEKTRQTPSPVPFLGQMVHERMVTYQSLPTLQISSPISLHQLQTVLGDLQWVSRGTPTTRRPLQLLYSSLKGIDDPRAIIHLSPEQQQGIAELRQALSHNARSRYNEQEPLLAYVHLTRAGSTLVLFQKGAQFPLAYFQTPLTDNQASPWGLLLLLGCQYLQAQALSSYAKTILKYYHNLPKTSLDNWIQSSEDPRVQELLQLWPQISSQGIQPPGPWKTLVTRAEVFLTPQFSPEPIPAALCLFSDGAARRGAYCLWKDHLLDFQAVPAPESAQKGELAGLLAGLAAAPPEPLNIWVDSKYLYSLLRTLVLGAWLQPDPVPSYALLYKSLLRHPAIFVGHVRSHSSASHPIASLNNYVDQL

SEQ ID NO: 8008 - protein, 576 aa, synthetic construct
GVLDAPPSHIGLEHLPPPPEVPQFPLNLERLQALQDLVHRSLEAGYISPWDGPGNNPVFPVRKPNGAWRFVHDLRVTNALTKPIPALSPGPPDLTAIPTHLPHIICLDLKDAFFQIPVEDRFRSYFAFTLPTPGGLQPHRRFAWRVLPQGFINSPALFQRALQEPLRQVSAAFSQSLLVSYMDDILYVSPTEEQRLQCYQTMAAHLRDLGFQVASEKTRQTPSPVPFLGQMVHERMVTYQSLPTLQISSPISLHQLQTVLGDLQWVSRGTPTTRRPLQLLYSSLKPIDDPRAIIHLSPEQQQGIAELRQALSHNARSRYNEQEPLLAYVHLTRAGSTLVLFQKGAQFPLAYFQTPLTDNQASPWGLLLLLGCQYLQAQALSSYAKTILKYYHNLPKTSLDNWIQSSEDPRVQELLQLWPQISSQGIQPPGPWKTLVTRAEVFLTPQFSPEPIPAALCLFSDGAARRGAYCLWKDHLLDFQAVPAPESAQKGELAGLLAGLAAAPPEPLNIWVDSKYLYSLLRTLVLGAWLQPDPVPSYALLYKSLLRHPAIFVGHVRSHSSASHPIASLNNYVDQL

SEQ ID NO: 8009 - protein, 576 aa, Bovine leukemia virus
GVLDTPPSHIGLEHLPPPPEVPQFPLNLERLQALQDLVHRSLEAGYISPWDGPGNNPVFPVRKPNGAWRFVHDLRATNALTKPIPALSPGPPDLTAIPTHPPHIICLDLKDAFFQIPVEDRFRFYLSFTLPSPGGLQPHRRFAWRVLPQGFINSPALFERALQEPLRQVSAAFSQSLLVSYMDDILYASPTEEQRSQCYQALAARLRDLGFQVASEKTSQTPSPVPFLGQMVHEQIVTYQSLPTLQISSPISLHQLQAVLGDLQWVSRGTPTTRRPLQLLYSSLKRHHDPRAIIQLSPEQLQGIAELRQALSHNARSRYNEQEPLLAYVHLTRAGSTLVLFQKGAQFPLAYFQTPLTDNQASPWGLLLLLGCQYLQTQALSSYAKPILKYYHNLPKTSLDNWIQSSEDPRVQELLQLWPQISSQGIQPPGPWKTLITRAEVFLTPQFSPDPIPAALCLFSDGATGRGAYCLWKDHLLDFQAVPAPESAQKGELAGLLAGLAAAPPEPVNIWVDSKYLYSLLRTLVLGAWLQPDPVPSYALLYKSLLRHPAIVVGHVRSHSSASHPIASLNNYVDQL

SEQ ID NO: 8010 - protein, 576 aa, synthetic construct
GVLDTPPSHIGLEHLPPPPEVPQFPLNLERLQALQDLVHRSLEAGYISPWDGPGNNPVFPVRKPNGAWRFVHDLRATNALTKPIPALSPGPPDLTAIPTHPPHIICLDLKDAFFQIPVEDRFRFYLSFTLPSPGGLQPHRRFAWRVLPQGFINSPALFNRALQEPLRQVSAAFSQSLLVSYMDDILYASPTEEQRSQCYQALAARLRDLGFQVASEKTSQTPSPVPFLGQMVHEQIVTYQSLPTLQISSPISLHQLQAVLGDLQWVSRGTPTTRRPLQLLYSSLKRHHDPRAIIQLSPEQLQGIAELRQALSHNARSRYNEQEPLLAYVHLTRAGSTLVLFQKGAQFPLAYFQTPLTDNQASPWGLLLLLGCQYLQTQALSSYAKPILKYYHNLPKTSLDNWIQSSEDPRVQELLQLWPQISSQGIQPPGPWKTLITRAEVFLTPQFSPDPIPAALCLFSDGATGRGAYCLWKDHLLDFQAVPAPESAQKGELAGLLAGLAAAPPEPVNIWVDSKYLYSLLRTWVLGAWLQPDPVPSYALLYKSLLRHPAIVVGHVRSHSSASHPIASLNNYVDQL

SEQ ID NO: 8011 - protein, 576 aa, synthetic construct
GVLDTPPSHIGLEHLPPPPEVPQFPLNLERLQALQDLVHRSLEAGYISPWDGPGNNPVFPVRKPNGAWRFVHDLRATNALTKPIPALSPGPPDLTAPPTHPPHIICLDLKDAFFQIPVEDRFRFYLSFTLPSPGGLQPHRRFAWRVLPQGFINSPALFQRALQEPLRQVSAAFSQSLLVSYMDDILYASPTEEQRSQCYQALAARLRDLGFQVASEKTSQTPSPVPFLGQMVHEQIVTYQSLPTLQISSPISLHQLQAVLGDLQWVSRGTPTTRRPLQLLYSSLKRHHDPRAIIQLSPEQLQGIAELRQALSHNARSRYNEQEPLLAYVHLTRAGSTLVLFQKGAQFPLAYFQTPLTDNQASPWGLLLLLGCQYLQTQALSSYAKPILKYYHNLPKTSLDNWIQSSEDPRVQELLQLWPQISSQGIQPPGPWKTLITRAEVFLTPQFSPDPIPAALCLFSDGATGRGAYCLWKDHLLDFQAVPAPESAQKGELAGLLAGLAAAPPEPVNIWVDSKYLYSLLRTWVLGAWLQPDPVPSYALLYKSLLRHPAIVVGHVRSHSSASHPIASLNNYVDQL

SEQ ID NO: 8012 - protein, 748 aa, Feline foamy virus
MDLLKPLTVERKGVKIKGYWNSQADITCVPKDLLQGEEPVRQQNVTTIHGTQEGDVYYVNLKIDGRRINTEVIGTTLDYAIITPGDVPWILKKPLELTIKLDLEEQQGTLLNNSILSKKGKEELKQLFEKYSALWQSWENQVGHRRIRPHKIATGTVKPTPQKQYHINPKAKPDIQIVINDLLKQGVLIQKESTMNTPVYPVPKPNGRWRMVLDYRAVNKVTPLIAVQNQHSYGILGSLFKGRYKTTIDLSNGFWAHPIVPEDYWITAFTWQGKQYCWTVLPQGFLNSPGLFTGDVVDLLQGIPNVEVYVDDVYISHDSEKEHLEYLDILFNRLKEAGYIISLKKSNIANSIVDFLGFQITNEGRGLTDTFKEKLENITAPTTLKQLQSILGLLNFARNFIPDFTELIAPLYALIPKSTKNYVPWQIEHSTTLETLITKLNGAEYLQGRKGDKTLIMKVNASYTTGYIRYYNEGEKKPISYVSIVFSKTELKFTELEKLLTTVHKGLLKALDLSMGQNIHVYSPIVSMQNIQKTPQTAKKALASRWLSWLSYLEDPRIRFFYDPQMPALKDLPAVDTGKDNKKHPSNFQHIFYTDGSAITSPTKEGHLNAGMGIVYFINKDGNLQKQQEWSISLGNHTAQFAEIAAFEFALKKCLPLGGNILVVTDSNYVAKAYNEELDVWASNGFVNNRKKPLKHISKWKSVADLKRLRPDVVVTHEPGHQKLDSSPHAYGNNLADQLATQASFKVH

SEQ ID NO: 8013 - protein, 748 aa, synthetic construct
MDLLKPLTVERKGVKIKGYWNSQADITCVPKDLLQGEEPVRQQNVTTIHGTQEGDVYYVNLKIDGRRINTEVIGTTLDYAIITPGDVPWILKKPLELTIKLDLEEQQGTLLNNSILSKKGKEELKQLFEKYSALWQSWENQVGHRRIRPHKIATGTVKPTPQKQYHINPKAKPDIQIVINDLLKQGVLIQKESTMNTPVYPVPKPNGRWRMVLDYRAVNKVTPLIAVQNQHSYGILGSLFKGRYKTTIDLSNGFWAHPIVPEDYWITAFTWQGKQYCWTVLPQGFLNSPGLFNGDVVDLLQGIPNVEVYVDDVYISHDSEKEHLEYLDILFNRLKEAGYIISLKKSNIANSIVDFLGFQITNEGRGLTDTFKEKLENITAPTTLKQLQSILGLLNFARNFIPDFTELIAPLYALIPKSPKNYVPWQIEHSTTLETLITKLNGAEYLQGRKGDKTLIMKVNASYTTGYIRYYNEGEKKPISYVSIVFSKTELKFTELEKLLTTVHKGLLKALDLSMGQNIHVYSPIVSMQNIQKTPQTAKKALASRWLSWLSYLEDPRIRFFYDPQMPALKDLPAVDTGKDNKKHPSNFQHIFYTDGSAITSPTKEGHLNAGMGIVYFINKDGNLQKQQEWSISLGNHTAQFAEIAAFEFALKKCLPLGGNILVVTDSNYVAKAYNEELDVWASNGFVNNRKKPLKHISKWKSVADLKRLRPDVVVTHEPGHQKLDSSPHAYGNNLADQLATQASFKVH

SEQ ID NO: 8014 - protein, 748 aa, synthetic construct
MDLLKPLTVERKGVKIKGYWNSQADITCVPKDLLQGEEPVRQQNVTTIHGTQEGDVYYVNLKIDGRRINTEVIGTTLDYAIITPGDVPWILKKPLELTIKLDLEEQQGTLLNNSILSKKGKEELKQLFEKYSALWQSWENQVGHRRIRPHKIATGTVKPTPQKQYHINPKAKPDIQIVINDLLKQGVLIQKESTMNTPVYPVPKPNGRWRMVLDYRAVNKVTPLIAVQNQHSYGILGSLFKGRYKTTIDLSNGFWAHPIVPEDYWITAFTWQGKQYCWTVLPQGFLNSPGLFNGDVVDLLQGIPNVEVYVDDVYISHDSEKEHLEYLDILFNRLKEAGYIISLKKSNIANSIVDFLGFQITNEGRGLTDTFKEKLENITAPTTLKQLQSILGKLNFARNFIPDFTELIAPLYALIPKSPKNYVPWQIEHSTTLETLITKLNGAEYLQGRKGDKTLIMKVNASYTTGYIRYYNEGEKKPISYVSIVFSKTELKFTELEKLLTTVHKGLLKALDLSMGQNIHVYSPIVSMQNIQKTPQTAKKALASRWLSWLSYLEDPRIRFFYDPQMPALKDLPAVDTGKDNKKHPSNFQHIFYTDGSAITSPTKEGHLNAGMGIVYFINKDGNLQKQQEWSISLGNHTAQFAEIAAFEFALKKCLPLGGNILVVTDSNYVAKAYNEELDVWASNGFVNNRKKPLKHISKWKSVADLKRLRPDVVVTHEPGHQKLDSSPHAYGNNLADQLATQASFKVH

SEQ ID NO: 8015 - protein, 662 aa, Feline foamy virus
VPWILKKPLELTIKLDLEEQQGTLLNNSILSKKGKEELKQLFEKYSALWQSWENQVGHRRIRPHKIATGTVKPTPQKQYHINPKAKPDIQIVINDLLKQGVLIQKESTMNTPVYPVPKPNGRWRMVLDYRAVNKVTPLIAVQNQHSYGILGSLFKGRYKTTIDLSNGFWAHPIVPEDYWITAFTWQGKQYCWTVLPQGFLNSPGLFTGDVVDLLQGIPNVEVYVDDVYISHDSEKEHLEYLDILFNRLKEAGYIISLKKSNIANSIVDFLGFQITNEGRGLTDTFKEKLENITAPTTLKQLQSILGLLNFARNFIPDFTELIAPLYALIPKSTKNYVPWQIEHSTTLETLITKLNGAEYLQGRKGDKTLIMKVNASYTTGYIRYYNEGEKKPISYVSIVFSKTELKFTELEKLLTTVHKGLLKALDLSMGQNIHVYSPIVSMQNIQKTPQTAKKALASRWLSWLSYLEDPRIRFFYDPQMPALKDLPAVDTGKDNKKHPSNFQHIFYTDGSAITSPTKEGHLNAGMGIVYFINKDGNLQKQQEWSISLGNHTAQFAEIAAFEFALKKCLPLGGNILVVTDSNYVAKAYNEELDVWASNGFVNNRKKPLKHISKWKSVADLKRLRPDVVVTHEPGHQKLDSSPHAYGNNLADQLATQASFKVH

SEQ ID NO: 8016 - protein, 662 aa, synthetic construct
VPWILKKPLELTIKLDLEEQQGTLLNNSILSKKGKEELKQLFEKYSALWQSWENQVGHRRIRPHKIATGTVKPTPQKQYHINPKAKPDIQIVINDLLKQGVLIQKESTMNTPVYPVPKPNGRWRMVLDYRAVNKVTPLIAVQNQHSYGILGSLFKGRYKTTIDLSNGFWAHPIVPEDYWITAFTWQGKQYCWTVLPQGFLNSPGLFNGDVVDLLQGIPNVEVYVDDVYISHDSEKEHLEYLDILFNRLKEAGYIISLKKSNIANSIVDFLGFQITNEGRGLTDTFKEKLENITAPTTLKQLQSILGLLNFARNFIPDFTELIAPLYALIPKSPKNYVPWQIEHSTTLETLITKLNGAEYLQGRKGDKTLIMKVNASYTTGYIRYYNEGEKKPISYVSIVFSKTELKFTELEKLLTTVHKGLLKALDLSMGQNIHVYSPIVSMQNIQKTPQTAKKALASRWLSWLSYLEDPRIRFFYDPQMPALKDLPAVDTGKDNKKHPSNFQHIFYTDGSAITSPTKEGHLNAGMGIVYFINKDGNLQKQQEWSISLGNHTAQFAEIAAFEFALKKCLPLGGNILVVTDSNYVAKAYNEELDVWASNGFVNNRKKPLKHISKWKSVADLKRLRPDVVVTHEPGHQKLDSSPHAYGNNLADQLATQASFKVH

SEQ ID NO: 8017 - protein, 662 aa, synthetic construct
VPWILKKPLELTIKLDLEEQQGTLLNNSILSKKGKEELKQLFEKYSALWQSWENQVGHRRIRPHKIATGTVKPTPQKQYHINPKAKPDIQIVINDLLKQGVLIQKESTMNTPVYPVPKPNGRWRMVLDYRAVNKVTPLIAVQNQHSYGILGSLFKGRYKTTIDLSNGFWAHPIVPEDYWITAFTWQGKQYCWTVLPQGFLNSPGLFNGDVVDLLQGIPNVEVYVDDVYISHDSEKEHLEYLDILFNRLKEAGYIISLKKSNIANSIVDFLGFQITNEGRGLTDTFKEKLENITAPTTLKQLQSILGKLNFARNFIPDFTELIAPLYALIPKSPKNYVPWQIEHSTTLETLITKLNGAEYLQGRKGDKTLIMKVNASYTTGYIRYYNEGEKKPISYVSIVFSKTELKFTELEKLLTTVHKGLLKALDLSMGQNIHVYSPIVSMQNIQKTPQTAKKALASRWLSWLSYLEDPRIRFFYDPQMPALKDLPAVDTGKDNKKHPSNFQHIFYTDGSAITSPTKEGHLNAGMGIVYFINKDGNLQKQQEWSISLGNHTAQFAEIAAFEFALKKCLPLGGNILVVTDSNYVAKAYNEELDVWASNGFVNNRKKPLKHISKWKSVADLKRLRPDVVVTHEPGHQKLDSSPHAYGNNLADQLATQASFKVH

SEQ ID NO: 8018 - protein, 670 aa, Feline leukemia virus
TLQLEEEYRLFEPESTQKQEMDIWLKNFPQAWAETGGMGTAHCQAPVLIQLKATATPISIRQYPMPHEAYQGIKPHIRRMLDQGILKPCQSPWNTPLLPVKKPGTEDYRPVQDLREVNKRVEDIHPTVPNPYNLLSTLPPSHPWYTVLDLKDAFFCLRLHSESQLLFAFEWRDPEIGLSGQLTWTRLPQGFKNSPTLFDEALHSDLADFRVRYPALVLLQYVDDLLLAAATRTECLEGTKALLETLGNKGYRASAKKAQICLQEVTYLGYSLKDGQRWLTKARKEAILSIPVPKNSRQVREFLGTAGYCRLWIPGFAELAAPLYPLTRPGTLFQWGTEQQLAFEDIKKALLSSPALGLPDITKPFELFIDENSGFAKGVLVQKLGPWKRPVAYLSKKLDTVASGWPPCLRMVAAIAILVKDAGKLTLGQPLTILTSHPVEALVRQPPNKWLSNARMTHYQAMLLDAERVHFGPTVSLNPATLLPLPSGGNHHDCLQILAETHGTRPDLTDQPLPDADLTWYTDGSSFIRNGEREAGAAVTTESEVIWAAPLPPGTSAQRAELIALTQALKMAEGKKLTVYTDSRYAFATTHVHGEIYRRRGLLTSEGKEIKNKNEILALLEALFLPKRLSIIHCPGHQKGDSPQAKGNRLADDTAKKAATETHSSLTVLP

SEQ ID NO: 8019 - protein, 670 aa, synthetic construct
TLQLEEEYRLFEPESTQKQEMDIWLKNFPQAWAETGGMGTAHCQAPVLIQLKATATPISIRQYPMPHEAYQGIKPHIRRMLDQGILKPCQSPWNTPLLPVKKPGTEDYRPVQDLREVNKRVEDIHPTVPNPYNLLSTLPPSHPWYTVLDLKDAFFCLRLHSESQLLFAFEWRDPEIGLSGQLTWTRLPQGFKNSPTLFNEALHSDLADFRVRYPALVLLQYVDDLLLAAATRTECLEGTKALLETLGNKGYRASAKKAQICLQEVTYLGYSLKDGQRWLTKARKEAILSIPVPKNSRQVREFLGTAGYCRLWIPGFAELAAPLYPLTRPGTLFQWGTEQQLAFEDIKKALLSSPALGLPDITKPFELFIDENSGFAKGVLVQKLGPWKRPVAYLSKKLDTVASGWPPCLRMVAAIAILVKDAGKLTLGQPLTILTSHPVEALVRQPPNKWLSNARMTHYQAMLLDAERVHFGPTVSLNPATLLPLPSGGNHHDCLQILAETHGTRPDLTDQPLPDADLTWYTDGSSFIRNGEREAGAAVTTESEVIWAAPLPPGTSAQRAELIALTQALKMAEGKKLTVYTDSRYAFATTHVHGEIYRRRGWLTSEGKEIKNKNEILALLEALFLPKRLSIIHCPGHQKGDSPQAKGNRLADDTAKKAATETHSSLTVLP

SEQ ID NO: 8020 - protein, 670 aa, synthetic construct
TLQLEEEYRLFEPESTQKQEMDIWLKNFPQAWAETGGMGTAHCQAPVLIQLKATATPISIRQYPMPHEAYQGIKPHIRRMLDQGILKPCQSPWNTPLLPVKKPGTEDYRPVQDLREVNKRVEDIHPTVPNPYNLLSTLPPSHPWYTVLDLKDAFFCLRLHSESQLLFAFEWRDPEIGLSGQLTWTRLPQGFKNSPTLFNEALHSDLADFRVRYPALVLLQYVDDLLLAAATRTECLEGTKALLETLGNKGYRASAKKAQICLQEVTYLGYSLKDGQRWLTKARKEAILSIPVPKNSRQVREFLGKAGYCRLFIPGFAELAAPLYPLTRPGTLFQWGTEQQLAFEDIKKALLSSPALGLPDITKPFELFIDENSGFAKGVLVQKLGPWKRPVAYLSKKLDTVASGWPPCLRMVAAIAILVKDAGKLTLGQPLTILTSHPVEALVRQPPNKWLSNARMTHYQAMLLDAERVHFGPTVSLNPATLLPLPSGGNHHDCLQILAETHGTRPDLTDQPLPDADLTWYTDGSSFIRNGEREAGAAVTTESEVIWAAPLPPGTSAQRAELIALTQALKMAEGKKLTVYTDSRYAFATTHVHGEIYRRRGWLTSEGKEIKNKNEILALLEALFLPKRLSIIHCPGHQKGDSPQAKGNRLADDTAKKAATETHSSLTVLP

SEQ ID NO: 8021 - protein, 751 aa, unidentified
MNPLQLLQPLPAEIKGTKLLAHWNSGATITCIPESFLEDEQPIKKTLIKTIHGEKQQNVYYVTFKVKGRKVEAEVIASPYEYILLSPTDVPWLTQQPLQLTILVPLQEYQEKILSKTALPEDQKQQLKTLFVKYDNLWQHWENQVGHRKIRPHNIATGDYPPRPQKQYPINPKAKPSIQIVIDDLLKQGVLTPQNSTMNTPVYPVPKPDGRWRMVLDYREVNKTIPLTAAQNQHSAGILATIVRQKYKTTLDLANGFWAHPITPESYWLTAFTWQGKQYCWTRLPQGFLNSPALFTADVVDLLKEIPNVQVYVDDIYLSHDDPKEHVQQLEKVFQILLQAGYVVSLKKSEIGQKTVEFLGFNITKEGRGLTDTFKTKLLNITPPKDLKQLQSILGLLNFARNFIPNFAELVQPLYNLIASAKGKYIEWSEENTKQLNMVIEALNTASNLEERLPEQRLVIKVNTSPSAGYVRYYNETGKKPIMYLNYVFSKAELKFSMLEKLLTTMHKALIKAMDLAMGQEILVYSPIVSMTKIQKTPLPERKALPIRWITWMTYLEDPRIQFHYDKTLPELKHIPDVYTSSQSPVKHPSQYEGVFYTDGSAIKSPDPTKSNNAGMGIVHATYKPEYQVLNQWSIPLGNHTAQMAEIAAVEFACKKALKIPGPVLVITDSFYVAESANKELPYWKSNGFVNNKKKPLKHISKWKSIAECLSMKPDITIQHEKGISLQIPVFILKGNALADKLATQGSYVVN

SEQ ID NO: 8022 - protein, 751 aa, synthetic construct
MNPLQLLQPLPAEIKGTKLLAHWNSGATITCIPESFLEDEQPIKKTLIKTIHGEKQQNVYYVTFKVKGRKVEAEVIASPYEYILLSPTDVPWLTQQPLQLTILVPLQEYQEKILSKTALPEDQKQQLKTLFVKYDNLWQHWENQVGHRKIRPHNIATGDYPPRPQKQYPINPKAKPSIQIVIDDLLKQGVLTPQNSTMNTPVYPVPKPDGRWRMVLDYREVNKTIPLTAAQNQHSAGILATIVRQKYKTTLDLANGFWAHPITPESYWLTAFTWQGKQYCWTRLPQGFLNSPALFNADVVDLLKEIPNVQVYVDDIYLSHDDPKEHVQQLEKVFQILLQAGYVVSLKKSEIGQKTVEFLGFNITKEGRGLTDTFKTKLLNITPPKDLKQLQSILGLLNFARNFIPNFAELVQPLYNLIAPAKGKYIEWSEENTKQLNMVIEALNTASNLEERLPEQRLVIKVNTSPSAGYVRYYNETGKKPIMYLNYVFSKAELKFSMLEKLLTTMHKALIKAMDLAMGQEILVYSPIVSMTKIQKTPLPERKALPIRWITWMTYLEDPRIQFHYDKTLPELKHIPDVYTSSQSPVKHPSQYEGVFYTDGSAIKSPDPTKSNNAGMGIVHATYKPEYQVLNQWSIPLGNHTAQMAEIAAVEFACKKALKIPGPVLVITDSFYVAESANKELPYWKSNGFVNNKKKPLKHISKWKSIAECLSMKPDITIQHEKGISLQIPVFILKGNALADKLATQGSYVVN

SEQ ID NO: 8023 - protein, 751 aa, synthetic construct
MNPLQLLQPLPAEIKGTKLLAHWNSGATITCIPESFLEDEQPIKKTLIKTIHGEKQQNVYYVTFKVKGRKVEAEVIASPYEYILLSPTDVPWLTQQPLQLTILVPLQEYQEKILSKTALPEDQKQQLKTLFVKYDNLWQHWENQVGHRKIRPHNIATGDYPPRPQKQYPINPKAKPSIQIVIDDLLKQGVLTPQNSTMNTPVYPVPKPDGRWRMVLDYREVNKTIPLTAAQNQHSAGILATIVRQKYKTTLDLANGFWAHPITPESYWLTAFTWQGKQYCWTRLPQGFLNSPALFNADVVDLLKEIPNVQVYVDDIYLSHDDPKEHVQQLEKVFQILLQAGYVVSLKKSEIGQKTVEFLGFNITKEGRGLTDTFKTKLLNITPPKDLKQLQSILGKLNFARNFIPNFAELVQPLYNLIAPAKGKYIEWSEENTKQLNMVIEALNTASNLEERLPEQRLVIKVNTSPSAGYVRYYNETGKKPIMYLNYVFSKAELKFSMLEKLLTTMHKALIKAMDLAMGQEILVYSPIVSMTKIQKTPLPERKALPIRWITWMTYLEDPRIQFHYDKTLPELKHIPDVYTSSQSPVKHPSQYEGVFYTDGSAIKSPDPTKSNNAGMGIVHATYKPEYQVLNQWSIPLGNHTAQMAEIAAVEFACKKALKIPGPVLVITDSFYVAESANKELPYWKSNGFVNNKKKPLKHISKWKSIAECLSMKPDITIQHEKGISLQIPVFILKGNALADKLATQGSYVVN

SEQ ID NO: 8024 - protein, 662 aa, unidentified
VPWLTQQPLQLTILVPLQEYQEKILSKTALPEDQKQQLKTLFVKYDNLWQHWENQVGHRKIRPHNIATGDYPPRPQKQYPINPKAKPSIQIVIDDLLKQGVLTPQNSTMNTPVYPVPKPDGRWRMVLDYREVNKTIPLTAAQNQHSAGILATIVRQKYKTTLDLANGFWAHPITPESYWLTAFTWQGKQYCWTRLPQGFLNSPALFTADVVDLLKEIPNVQVYVDDIYLSHDDPKEHVQQLEKVFQILLQAGYVVSLKKSEIGQKTVEFLGFNITKEGRGLTDTFKTKLLNITPPKDLKQLQSILGLLNFARNFIPNFAELVQPLYNLIASAKGKYIEWSEENTKQLNMVIEALNTASNLEERLPEQRLVIKVNTSPSAGYVRYYNETGKKPIMYLNYVFSKAELKFSMLEKLLTTMHKALIKAMDLAMGQEILVYSPIVSMTKIQKTPLPERKALPIRWITWMTYLEDPRIQFHYDKTLPELKHIPDVYTSSQSPVKHPSQYEGVFYTDGSAIKSPDPTKSNNAGMGIVHATYKPEYQVLNQWSIPLGNHTAQMAEIAAVEFACKKALKIPGPVLVITDSFYVAESANKELPYWKSNGFVNNKKKPLKHISKWKSIAECLSMKPDITIQHEKGISLQIPVFILKGNALADKLATQGSYVVN

SEQ ID NO: 8025 - protein, 662 aa, synthetic construct
VPWLTQQPLQLTILVPLQEYQEKILSKTALPEDQKQQLKTLFVKYDNLWQHWENQVGHRKIRPHNIATGDYPPRPQKQYPINPKAKPSIQIVIDDLLKQGVLTPQNSTMNTPVYPVPKPDGRWRMVLDYREVNKTIPLTAAQNQHSAGILATIVRQKYKTTLDLANGFWAHPITPESYWLTAFTWQGKQYCWTRLPQGFLNSPALFNADVVDLLKEIPNVQVYVDDIYLSHDDPKEHVQQLEKVFQILLQAGYVVSLKKSEIGQKTVEFLGFNITKEGRGLTDTFKTKLLNITPPKDLKQLQSILGLLNFARNFIPNFAELVQPLYNLIAPAKGKYIEWSEENTKQLNMVIEALNTASNLEERLPEQRLVIKVNTSPSAGYVRYYNETGKKPIMYLNYVFSKAELKFSMLEKLLTTMHKALIKAMDLAMGQEILVYSPIVSMTKIQKTPLPERKALPIRWITWMTYLEDPRIQFHYDKTLPELKHIPDVYTSSQSPVKHPSQYEGVFYTDGSAIKSPDPTKSNNAGMGIVHATYKPEYQVLNQWSIPLGNHTAQMAEIAAVEFACKKALKIPGPVLVITDSFYVAESANKELPYWKSNGFVNNKKKPLKHISKWKSIAECLSMKPDITIQHEKGISLQIPVFILKGNALADKLATQGSYVVN

SEQ ID NO: 8026 - protein, 662 aa, synthetic construct
VPWLTQQPLQLTILVPLQEYQEKILSKTALPEDQKQQLKTLFVKYDNLWQHWENQVGHRKIRPHNIATGDYPPRPQKQYPINPKAKPSIQIVIDDLLKQGVLTPQNSTMNTPVYPVPKPDGRWRMVLDYREVNKTIPLTAAQNQHSAGILATIVRQKYKTTLDLANGFWAHPITPESYWLTAFTWQGKQYCWTRLPQGFLNSPALFNADVVDLLKEIPNVQVYVDDIYLSHDDPKEHVQQLEKVFQILLQAGYVVSLKKSEIGQKTVEFLGFNITKEGRGLTDTFKTKLLNITPPKDLKQLQSILGKLNFARNFIPNFAELVQPLYNLIAPAKGKYIEWSEENTKQLNMVIEALNTASNLEERLPEQRLVIKVNTSPSAGYVRYYNETGKKPIMYLNYVFSKAELKFSMLEKLLTTMHKALIKAMDLAMGQEILVYSPIVSMTKIQKTPLPERKALPIRWITWMTYLEDPRIQFHYDKTLPELKHIPDVYTSSQSPVKHPSQYEGVFYTDGSAIKSPDPTKSNNAGMGIVHATYKPEYQVLNQWSIPLGNHTAQMAEIAAVEFACKKALKIPGPVLVITDSFYVAESANKELPYWKSNGFVNNKKKPLKHISKWKSIAECLSMKPDITIQHEKGISLQIPVFILKGNALADKLATQGSYVVN

SEQ ID NO: 8027 - protein, 669 aa, Gibbon ape leukemia virus
VLNLEEEYRLHEKPVPSSIDPSWLQLFPTVWAERAGMGLANQVPPVVVELRSGASPVAVRQYPMSKEAREGIRPHIQKFLDLGVLVPCRSPWNTPLLPVKKPGTNDYRPVQDLREINKRVQDIHPTVPNPYNLLSSLPPSYTWYSVLDLKDAFFCLRLHPNSQPLFAFEWKDPEKGNTGQLTWTRLPQGFKNSPTLFDEALHRDLAPFRALNPQVVLLQYVDDLLVAAPTYEDCKKGTQKLLQELSKLGYRVSAKKAQLCQREVTYLGYLLKEGKRWLTPARKATVMKIPVPTTPRQVREFLGTAGFCRLWIPGFASLAAPLYPLTKESIPFIWTEEHQQAFDHIKKALLSAPALALPDLTKPFTLYIDERAGVARGVLTQTLGPWRRPVAYLSKKLDPVASGWPTCLKAVAAVALLLKDADKLTLGQNVTVIASHSLESIVRQPPDRWMTNARMTHYQSLLLNERVSFAPPAVLNPATLLPVESEATPVHRCSEILAEETGTRRDLEDQPLPGVPTWYTDGSSFITEGKRRAGAPIVDGKRTVWASSLPEGTSAQKAELVALTQALRLAEGKNINIYTDSRYAFATAHIHGAIYKQRGLLTSAGKDIKNKEEILALLEAIHLPRRVAIIHCPGHQRGSNPVATGNRRADEAAKQAALSTRVLAGTTKP

SEQ ID NO: 8028 - protein, 669 aa, synthetic construct
VLNLEEEYRLHEKPVPSSIDPSWLQLFPTVWAERAGMGLANQVPPVVVELRSGASPVAVRQYPMSKEAREGIRPHIQKFLDLGVLVPCRSPWNTPLLPVKKPGTNDYRPVQDLREINKRVQDIHPTVPNPYNLLSSLPPSYTWYSVLDLKDAFFCLRLHPNSQPLFAFEWKDPEKGNTGQLTWTRLPQGFKNSPTLFNEALHRDLAPFRALNPQVVLLQYVDDLLVAAPTYEDCKKGTQKLLQELSKLGYRVSAKKAQLCQREVTYLGYLLKEGKRWLTPARKATVMKIPVPTTPRQVREFLGTAGFCRLWIPGFASLAAPLYPLTKPSIPFIWTEEHQQAFDHIKKALLSAPALALPDLTKPFTLYIDERAGVARGVLTQTLGPWRRPVAYLSKKLDPVASGWPTCLKAVAAVALLLKDADKLTLGQNVTVIASHSLESIVRQPPDRWMTNARMTHYQSLLLNERVSFAPPAVLNPATLLPVESEATPVHRCSEILAEETGTRRDLEDQPLPGVPTWYTDGSSFITEGKRRAGAPIVDGKRTVWASSLPEGTSAQKAELVALTQALRLAEGKNINIYTDSRYAFATAHIHGAIYKQRGWLTSAGKDIKNKEEILALLEAIHLPRRVAIIHCPGHQRGSNPVATGNRRADEAAKQAALSTRVLAGTTKP

SEQ ID NO: 8029 - protein, 669 aa, synthetic construct
VLNLEEEYRLHEKPVPSSIDPSWLQLFPTVWAERAGMGLANQVPPVVVELRSGASPVAVRQYPMSKEAREGIRPHIQKFLDLGVLVPCRSPWNTPLLPVKKPGTNDYRPVQDLREINKRVQDIHPTVPNPYNLLSSLPPSYTWYSVLDLKDAFFCLRLHPNSQPLFAFEWKDPEKGNTGQLTWTRLPQGFKNSPTLFNEALHRDLAPFRALNPQVVLLQYVDDLLVAAPTYEDCKKGTQKLLQELSKLGYRVSAKKAQLCQREVTYLGYLLKEGKRWLTPARKATVMKIPVPTTPRQVREFLGKAGFCRLFIPGFASLAAPLYPLTKPSIPFIWTEEHQQAFDHIKKALLSAPALALPDLTKPFTLYIDERAGVARGVLTQTLGPWRRPVAYLSKKLDPVASGWPTCLKAVAAVALLLKDADKLTLGQNVTVIASHSLESIVRQPPDRWMTNARMTHYQSLLLNERVSFAPPAVLNPATLLPVESEATPVHRCSEILAEETGTRRDLEDQPLPGVPTWYTDGSSFITEGKRRAGAPIVDGKRTVWASSLPEGTSAQKAELVALTQALRLAEGKNINIYTDSRYAFATAHIHGAIYKQRGWLTSAGKDIKNKEEILALLEAIHLPRRVAIIHCPGHQRGSNPVATGNRRADEAAKQAALSTRVLAGTTKP

SEQ ID NO: 8030 - protein, 588 aa, unidentified
AVLGLEHLPRPPQISQFPLNPERLQALQHLVRKALEAGHIEPYTGPGNNPVFPVKKANGTWRFIHDLRATNSLTIDLSSSSPGPPDLSSLPTTLAHLQTIDLRDAFFQIPLPKQFQPYFAFTVPQQCNYGPGTRYAWKVLPQGFKNSPTLFEMQLAHILQPIRQAFPQCTILQYMDDILLASPSHEDLLLLSEATMASLISHGLPVSENKTQQTPGTIKFLGQIISPNHLTYDAVPTVPIRSRWALPELQALLGEIQWVSKGTPTLRQPLHSLYCALQRHTDPRDQIYLNPSQVQSLVQLRQALSQNCRSRLVQTLPLLGAIMLTLTGTTTVVFQSKEQWPLVWLHAPLPHTSQCPWGQLLASAVLLLDKYTLQSYGLLCQTIHHNISTQTFNQFIQTSDHPSVPILLHHSHRFKNLGAQTGELWNTFLKTAAPLAPVKALMPVFTLSPVIINTAPCLFSDGSTSRAAYILWDKQILSQRSFPLPPPHKSAQRAELLGLLHGLSSARSWRCLNIFLDSKYLYHYLRTLALGTFQGRSSQAPFQALLPRLLSRKVVYLHHVRSHTNLPDPISRLNALTDALLITPVLQL

SEQ ID NO: 8031 - protein, 588 aa, synthetic construct
AVLGLEHLPRPPQISQFPLNPERLQALQHLVRKALEAGHIEPYTGPGNNPVFPVKKANGTWRFIHDLRATNSLTIDLSSSSPGPPDLSSLPTTLAHLQTIDLRDAFFQIPLPKQFQPYFAFTVPQQCNYGPGTRYAWKVLPQGFKNSPTLFQMQLAHILQPIRQAFPQCTILQYMDDILLASPSHEDLLLLSEATMASLISHGLPVSENKTQQTPGTIKFLGQIISPNHLTYDAVPTVPIRSRWALPELQALLGEIQWVSKGTPTLRQPLHSLYCALQPHTDPRDQIYLNPSQVQSLVQLRQALSQNCRSRLVQTLPLLGAIMLTLTGTTTVVFQSKEQWPLVWLHAPLPHTSQCPWGQLLASAVLLLDKYTLQSYGLLCQTIHHNISTQTFNQFIQTSDHPSVPILLHHSHRFKNLGAQTGELWNTFLKTAAPLAPVKALMPVFTLSPVIINTAPCLFSDGSTSRAAYILWDKQILSQRSFPLPPPHKSAQRAELLGLLHGLSSARSWRCLNIFLDSKYLYHYLRTLALGTFQGRSSQAPFQALLPRLLSRKVVYLHHVRSHTNLPDPISRLNALTDALLITPVLQL

SEQ ID NO: 8032 - protein, 588 aa, synthetic construct
AVLGLEHLPRPPQISQFPLNPERLQALQHLVRKALEAGHIEPYTGPGNNPVFPVKKANGTWRFIHDLRATNSLTIDLSSSSPGPPDLSSPPTTLAHLQTIDLRDAFFQIPLPKQFQPYFAFTVPQQCNYGPGTRYAWKVLPQGFKNSPTLFQMQLAHILQPIRQAFPQCTILQYMDDILLASPSHEDLLLLSEATMASLISHGLPVSENKTQQTPGTIKFLGQIISPNHLTYDAVPTVPIRSRWALPELQALLGEIQWVSKGTPTLRQPLHSLYCALQPHTDPRDQIYLNPSQVQSLVQLRQALSQNCRSRLVQTLPLLGAIMLTLTGTTTVVFQSKEQWPLVWLHAPLPHTSQCPWGQLLASAVLLLDKYTLQSYGLLCQTIHHNISTQTFNQFIQTSDHPSVPILLHHSHRFKNLGAQTGELWNTFLKTAAPLAPVKALMPVFTLSPVIINTAPCLFSDGSTSRAAYILWDKQILSQRSFPLPPPHKSAQRAELLGLLHGLSSARSWRCLNIFLDSKYLYHYLRTLALGTFQGRSSQAPFQALLPRLLSRKVVYLHHVRSHTNLPDPISRLNALTDALLITPVLQL

SEQ ID NO: 8033 - protein, 588 aa, unidentified
AVLGLEHLPRPPEISQFPLNPERLQALQHLVRKALEAGHIEPYTGPGNNPVFPVKKANGTWRFIHDLRATNSLTIDLSSSSPGPPDLSSLPTTLAHLQTIDLKDAFFQIPLPKQFQPYFAFTVPQQCNYGPGTRYAWRVLPQGFKNSPTLFEMQLAHILQPIRQAFPQCTILQYMDDILLASPSHADLQLLSEATMASLISHGLPVSENKTQQTPGTIKFLGQIISPNHLTYDAVPKVPIRSRWALPELQALLGEIQWVSKGTPTLRQPLHSLYCALQRHTDPRDQIYLNPSQVQSLVQLRQALSQNCRSRLVQTLPLLGAIMLTLTGTTTVVFQSKQQWPLVWLHAPLPHTSQCPWGQLLASAVLLLDKYTLQSYGLLCQTIHHNISTQTFNQFIQTSDHPSVPILLHHSHRFKNLGAQTGELWNTFLKTTAPLAPVKALMPVFTLSPVIINTAPCLFSDGSTSQAAYILWDKHILSQRSFPLPPPHKSAQRAELLGLLHGLSSARSWRCLNIFLDSKYLYHYLRTLALGTFQGRSSQAPFQALLPRLLSRKVVYLHHVRSHTNLPDPISRLNALTDALLITPVLQL

SEQ ID NO: 8034 - protein, 588 aa, synthetic construct
AVLGLEHLPRPPEISQFPLNPERLQALQHLVRKALEAGHIEPYTGPGNNPVFPVKKANGTWRFIHDLRATNSLTIDLSSSSPGPPDLSSLPTTLAHLQTIDLKDAFFQIPLPKQFQPYFAFTVPQQCNYGPGTRYAWRVLPQGFKNSPTLFQMQLAHILQPIRQAFPQCTILQYMDDILLASPSHADLQLLSEATMASLISHGLPVSENKTQQTPGTIKFLGQIISPNHLTYDAVPKVPIRSRWALPELQALLGEIQWVSKGTPTLRQPLHSLYCALQPHTDPRDQIYLNPSQVQSLVQLRQALSQNCRSRLVQTLPLLGAIMLTLTGTTTVVFQSKQQWPLVWLHAPLPHTSQCPWGQLLASAVLLLDKYTLQSYGLLCQTIHHNISTQTFNQFIQTSDHPSVPILLHHSHRFKNLGAQTGELWNTFLKTTAPLAPVKALMPVFTLSPVIINTAPCLFSDGSTSQAAYILWDKHILSQRSFPLPPPHKSAQRAELLGLLHGLSSARSWRCLNIFLDSKYLYHYLRTLALGTFQGRSSQAPFQALLPRLLSRKVVYLHHVRSHTNLPDPISRLNALTDALLITPVLQL

SEQ ID NO: 8035 - protein, 583 aa, unidentified
GLEHLPRPPEISQFPLNPERLQALQHLVRKALEAGHIEPYTGPGNNPVFPVKKANGTWRFIHDLRATNSLTVDLSSSSPGPPDLSSLPTTLAHLQTIDLKDAFFQIPLPKQFQPYFAFTVPQQCNYGPGTRYAWKVLPQGFKNSPTLFEMQLASILQPIRQAFPQCVILQYMDDILLASPSPEDLQQLSEATMASLISHGLPVSQDKTQQTPGTIKFLGQIISPNHITYDAVPTVPIRSRWALPELQALLGEIQWVSKGTPTLRQPLHSLYCALQGHTDPRDQIYLNPSQVQSLMQLQQALSQNCRSRLAQTLPLLGAIMLTLTGTTTVVFQSKQQWPLVWLHAPLPHTSQCPWGQLLASAVLLLDKYTLQSYGLLCQTIHHNISIQTFNQFIQTSDHPSVPILLHHSHRFKNLGAQTGELWNTFLKTAAPLAPVKALTPVFTLSPIIINTAPCLFSDGSTSQAAYILWDKHILSQRSFPLPPPHKSAQQAELLGLLHGLSSARSWHCLNIFLDSKYLYHYLRTLALGTFQGKSSQAPFQALLPRLLAHKVIYLHHVRSHTNLPDPISKLNALTDALLITPIL

SEQ ID NO: 8036 - protein, 583 aa, synthetic construct
GLEHLPRPPEISQFPLNPERLQALQHLVRKALEAGHIEPYTGPGNNPVFPVKKANGTWRFIHDLRATNSLTVDLSSSSPGPPDLSSLPTTLAHLQTIDLKDAFFQIPLPKQFQPYFAFTVPQQCNYGPGTRYAWKVLPQGFKNSPTLFQMQLASILQPIRQAFPQCVILQYMDDILLASPSPEDLQQLSEATMASLISHGLPVSQDKTQQTPGTIKFLGQIISPNHITYDAVPTVPIRSRWALPELQALLGEIQWVSKGTPTLRQPLHSLYCALQGHTDPRDQIYLNPSQVQSLMQLQQALSQNCRSRLAQTLPLLGAIMLTLTGTTTVVFQSKQQWPLVWLHAPLPHTSQCPWGQLLASAVLLLDKYTLQSYGLLCQTIHHNISIQTFNQFIQTSDHPSVPILLHHSHRFKNLGAQTGELWNTFLKTAAPLAPVKALTPVFTLSPIIINTAPCLFSDGSTSQAAYILWDKHILSQRSFPLPPPHKSAQQAELLGLLHGLSSARSWHCLNIFLDSKYLYHYLRTLAWGTFQGKSSQAPFQALLPRLLAHKVIYLHHVRSHTNLPDPISKLNALTDALLITPIL

SEQ ID NO: 8037 - protein, 583 aa, synthetic construct
GLEHLPRPPEISQFPLNPERLQALQHLVRKALEAGHIEPYTGPGNNPVFPVKKANGTWRFIHDLRATNSLTVDLSSSSPGPPDLSSPPTTLAHLQTIDLKDAFFQIPLPKQFQPYFAFTVPQQCNYGPGTRYAWKVLPQGFKNSPTLFQMQLASILQPIRQAFPQCVILQYMDDILLASPSPEDLQQLSEATMASLISHGLPVSQDKTQQTPGTIKFLGQIISPNHITYDAVPTVPIRSRWALPELQALLGEIQWVSKGTPTLRQPLHSLYCALQGHTDPRDQIYLNPSQVQSLMQLQQALSQNCRSRLAQTLPLLGAIMLTLTGTTTVVFQSKQQWPLVWLHAPLPHTSQCPWGQLLASAVLLLDKYTLQSYGLLCQTIHHNISIQTFNQFIQTSDHPSVPILLHHSHRFKNLGAQTGELWNTFLKTAAPLAPVKALTPVFTLSPIIINTAPCLFSDGSTSQAAYILWDKHILSQRSFPLPPPHKSAQQAELLGLLHGLSSARSWHCLNIFLDSKYLYHYLRTLAWGTFQGKSSQAPFQALLPRLLAHKVIYLHHVRSHTNLPDPISKLNALTDALLITPIL

SEQ ID NO: 8038 - protein, 584 aa, unidentified
GLEHLPPPPEVSQFPLNPERLQALTDLVSRALEAKHIEPYQGPGNNPIFPVKKPNGKWRFIHDLRATNSVTRDLASPSPGPPDLTSLPQGLPHLRTIDLTDAFFQIPLPTIFQPYFAFTLPQPNNYGPGTRYSWRVLPQGFKNSPTLFEQQLSHILTPVRKTFPNSLIIQYMDDILLASPAPGELAALTDKVTNALTKEGLPLSPEKTQATPGPIHFLGQVISQDCITYETLPSINVKSTWSLAELQSMLGELQWVSKGTPVLRSSLHQLYLALRGHRDPRDTIKLTSIQVQALRTIQKALTLNCRSRLVNQLPILALIMLRPTGTTAVLFQTKQKWPLVWLHTPHPATSLRPWGQLLANAVIILDKYSLQHYGQVCKSFHHNISNQALTYYLHTSDQSSVAILLQHSHRFHNLGAQPSGPWRSLLQMPQIFQNIDVLRPPFTISPVVINHAPCLFSDGSASKAAFIIWDRQVIHQQVLSLPSTCSAQAGELFGLLAGLQKSQPWVALNIFLDSKFLIGHLRRMALGAFPGPSTQCELHTQLLPLLQGKTVYVHHVRSHTLLQDPISRLNEATDALMLAPLLPL

SEQ ID NO: 8039 - protein, 584 aa, synthetic construct
GLEHLPPPPEVSQFPLNPERLQALTDLVSRALEAKHIEPYQGPGNNPIFPVKKPNGKWRFIHDLRATNSVTRDLASPSPGPPDLTSLPQGLPHLRTIDLTDAFFQIPLPTIFQPYFAFTLPQPNNYGPGTRYSWRVLPQGFKNSPTLFQQQLSHILTPVRKTFPNSLIIQYMDDILLASPAPGELAALTDKVTNALTKEGLPLSPEKTQATPGPIHFLGQVISQDCITYETLPSINVKSTWSLAELQSMLGELQWVSKGTPVLRSSLHQLYLALRGHRDPRDTIKLTSIQVQALRTIQKALTLNCRSRLVNQLPILALIMLRPTGTTAVLFQTKQKWPLVWLHTPHPATSLRPWGQLLANAVIILDKYSLQHYGQVCKSFHHNISNQALTYYLHTSDQSSVAILLQHSHRFHNLGAQPSGPWRSLLQMPQIFQNIDVLRPPFTISPVVINHAPCLFSDGSASKAAFIIWDRQVIHQQVLSLPSTCSAQAGELFGLLAGLQKSQPWVALNIFLDSKFLIGHLRRMAWGAFPGPSTQCELHTQLLPLLQGKTVYVHHVRSHTLLQDPISRLNEATDALMLAPLLPL

SEQ ID NO: 8040 - protein, 584 aa, synthetic construct
GLEHLPPPPEVSQFPLNPERLQALTDLVSRALEAKHIEPYQGPGNNPIFPVKKPNGKWRFIHDLRATNSVTRDLASPSPGPPDLTSPPQGLPHLRTIDLTDAFFQIPLPTIFQPYFAFTLPQPNNYGPGTRYSWRVLPQGFKNSPTLFQQQLSHILTPVRKTFPNSLIIQYMDDILLASPAPGELAALTDKVTNALTKEGLPLSPEKTQATPGPIHFLGQVISQDCITYETLPSINVKSTWSLAELQSMLGELQWVSKGTPVLRSSLHQLYLALRGHRDPRDTIKLTSIQVQALRTIQKALTLNCRSRLVNQLPILALIMLRPTGTTAVLFQTKQKWPLVWLHTPHPATSLRPWGQLLANAVIILDKYSLQHYGQVCKSFHHNISNQALTYYLHTSDQSSVAILLQHSHRFHNLGAQPSGPWRSLLQMPQIFQNIDVLRPPFTISPVVINHAPCLFSDGSASKAAFIIWDRQVIHQQVLSLPSTCSAQAGELFGLLAGLQKSQPWVALNIFLDSKFLIGHLRRMAWGAFPGPSTQCELHTQLLPLLQGKTVYVHHVRSHTLLQDPISRLNEATDALMLAPLLPL

SEQ ID NO: 8041 - protein, 584 aa, unidentified
GLEHLPPPPEVSQFPLNPERLQALTDLVSRALEAKHIEPYQGPGNNPIFPVKKPNGKWRFIHDLRATNSLTRDLASPSPGPPDLTSLPQDLPHLRTIDLTDAFFQIPLPAVFQPYFAFTLPQPNNHGPGTRYSWRVLPQGFKNSPTLFEQQLSHILAPVRKAFPNSLIIQYMDDILLASPALRELTALTDKVTNALTKEGLPMSLEKTQATPGSIHFLGQVISPDCITYETLPSIHVKSIWSLAELQSMLGELQWVSKGTPVLRSSLHQLYLALRGHRDPRDTIELTSTQVQALKTIQKALALNCRSRLVSQLPILALIILRPTGTTAVLFQTKQKWPLVWLHTPHPATSLRPWGQLLANAIITLDKYSLQHYGQICKSFHHNISNQALTYYLHTSDQSSVAILLQHSHRFHNLGAQPSGPWRSLLQVPQIFQNIDVLRPPFIISPVVIDHAPCLFSDGATSKAAFILWDKQVIHQQVLPLPSTCSAQAGELFGLLAGLQKSKPWPALNIFLDSKFLIGHLRRMALGAFLGPSTQCDLHARLFPLLQGKTVYVHHVRSHTLLQDPISRLNEATDALMLAPLLPL

SEQ ID NO: 8042 - protein, 584 aa, synthetic construct
GLEHLPPPPEVSQFPLNPERLQALTDLVSRALEAKHIEPYQGPGNNPIFPVKKPNGKWRFIHDLRATNSLTRDLASPSPGPPDLTSLPQDLPHLRTIDLTDAFFQIPLPAVFQPYFAFTLPQPNNHGPGTRYSWRVLPQGFKNSPTLFQQQLSHILAPVRKAFPNSLIIQYMDDILLASPALRELTALTDKVTNALTKEGLPMSLEKTQATPGSIHFLGQVISPDCITYETLPSIHVKSIWSLAELQSMLGELQWVSKGTPVLRSSLHQLYLALRGHRDPRDTIELTSTQVQALKTIQKALALNCRSRLVSQLPILALIILRPTGTTAVLFQTKQKWPLVWLHTPHPATSLRPWGQLLANAIITLDKYSLQHYGQICKSFHHNISNQALTYYLHTSDQSSVAILLQHSHRFHNLGAQPSGPWRSLLQVPQIFQNIDVLRPPFIISPVVIDHAPCLFSDGATSKAAFILWDKQVIHQQVLPLPSTCSAQAGELFGLLAGLQKSKPWPALNIFLDSKFLIGHLRRMAWGAFLGPSTQCDLHARLFPLLQGKTVYVHHVRSHTLLQDPISRLNEATDALMLAPLLPL

SEQ ID NO: 8043 - protein, 584 aa, synthetic construct
GLEHLPPPPEVSQFPLNPERLQALTDLVSRALEAKHIEPYQGPGNNPIFPVKKPNGKWRFIHDLRATNSLTRDLASPSPGPPDLTSPPQDLPHLRTIDLTDAFFQIPLPAVFQPYFAFTLPQPNNHGPGTRYSWRVLPQGFKNSPTLFQQQLSHILAPVRKAFPNSLIIQYMDDILLASPALRELTALTDKVTNALTKEGLPMSLEKTQATPGSIHFLGQVISPDCITYETLPSIHVKSIWSLAELQSMLGELQWVSKGTPVLRSSLHQLYLALRGHRDPRDTIELTSTQVQALKTIQKALALNCRSRLVSQLPILALIILRPTGTTAVLFQTKQKWPLVWLHTPHPATSLRPWGQLLANAIITLDKYSLQHYGQICKSFHHNISNQALTYYLHTSDQSSVAILLQHSHRFHNLGAQPSGPWRSLLQVPQIFQNIDVLRPPFIISPVVIDHAPCLFSDGATSKAAFILWDKQVIHQQVLPLPSTCSAQAGELFGLLAGLQKSKPWPALNIFLDSKFLIGHLRRMAWGAFLGPSTQCDLHARLFPLLQGKTVYVHHVRSHTLLQDPISRLNEATDALMLAPLLPL

SEQ ID NO: 8044 - protein, 584 aa, synthetic construct
HLPPPPQVDQFPLNLPERLQALNDLVSKALEAGHIEPYSGPGNNPVFPVKKPNGKWRFIHDLRATNAITTTLTSPSPGPPDLTSLPTALPHLQTIDLTDAFFQIPLPKQYQPYFAFTIPQPCNYGPGTRYAWTVLPQGFKNSPTLFQQQLAAVLNPMRKMFPTSTIVQYMDDILLASPTNEELQQLSQLTLQALTTHGLPISQEKTQQTPGQIRFLGQVISPNHITYESTPTIPIKSQWTLTELQVILGEIQWVSKGTPILRKHLQSLYSALHPYRDPRACITLTPQQLHALHAIQQALQHNCRGRLNPALPLLGLISLSTSGTTSVIFQPKQNWPLAWLHTPHPPTSLCPWGHLLACTILTLDKYTLQHYGQLCQSFHHNMSKQALCDFLRNSPHPSVGILIHHMGRFHNLGSQPSGPWKTLLHLPTLLQEPRLLRPIFTLSPVVLDTAPCLFSDGSPQKAAYVLWDQTILQQDITPLPSHETHSAQKGELLALICGLRAAKPWPSLNIFLDSKYLIKYLHSLAIGAFLGTSAHQTLQAALPPLLQGKTIYLHHVRSHTNLPDPISTFNEYTDSLILAPLVPL

SEQ ID NO: 8045 - protein, 581 aa, Jaagsiekte sheep retrovirus
PLGTSDSPVTHADPIDWKSEEPVWVDQWPLTQEKLSAAQQLVQEQLRLGHIEPSTSAWNSPIFVIKKKSGKWRLLQDLRKVNETMMHMGALQPGLPTPSAIPDKSYIIVIDLKDCFYTIPLAPQDCKRFAFSLPSVNFKEPMQRYQWRVLPQGMTNSPTLCQKFVATAIAPVRQRFPQLYLVHYMDDILLAHTDEHLLYQAFSILKQHLSLNGLVIADEKIQTHFPYNYLGFSLYPRVYNTQLVKLQTDHLKTLNDFQKLLGDINWIRPYLKLPTYTLQPLFDILKGDSDPASPRTLSLEGRTALQSIEEAIRQQQITYCDYQRSWGLYILPTPRAPTGVLYQDKPLRWIYLSATPTKHLLPYYELVAKIIAKGRHEAIQYFGMEPPFICVPYALEQQDWLFQFSDNWSIAFANYPGQITHHYPSDKLLQFASSHAFIFPKIVRRQPIPEATLIFTDGSSNGTAALIINHQTYYAQTSFSSAQVVELFAVHQALLTVPTSFNLFTDSSYVVGALQMIETVPIIGTTSPEVLNLFTLIQQVLHCRQHPCFFGHIRAHSTLPGALVQGNHTADVLTKQVFFQS

SEQ ID NO: 8046 - protein, 581 aa, synthetic construct
PLGTSDSPVTHADPIDWKSEEPVWVDQWPLTQEKLSAAQQLVQEQLRLGHIEPSTSAWNSPIFVIKKKSGKWRLLQDLRKVNETMMHMGALQPGLPTPSPIPDKSYIIVIDLKDCFYTIPLAPQDCKRFAFSLPSVNFKEPMQRYQWRVLPQGMTNSPTLCQKFVATAIAPVRQRFPQLYLVHYMDDILLAHTDEHLLYQAFSILKQHLSLNGLVIADEKIQTHFPYNYLGFSLYPRVYNTQLVKLQTDHLKTLNDFQKLLGDINWIRPYLKLPTYTLQPLFDILKGDSDPASPRTLSLEGRTALQSIEEAIRQQQITYCDYQRSWGLYILPTPRAPTGVLYQDKPLRWIYLSATPTKHLLPYYELVAKIIAKGRHEAIQYFGMEPPFICVPYALEQQDWLFQFSDNWSIAFANYPGQITHHYPSDKLLQFASSHAFIFPKIVRRQPIPEATLIFTDGSSNGTAALIINHQTYYAQTSFSSAQVVELFAVHQALLTVPTSFNLFTDSSYVVGALQMIETVPIIGTTSPEVLNLFTLIQQVLHCRQHPCFFGHIRAHSTLPGALVQGNHTADVLTKQVFFQS

SEQ ID NO: 8047 - protein, 793 aa, Koala retrovirus
TLGDQGSRGSDPLPEPRVTLTVEGIPTEFLVNTGAEHSVLTKPMGKMGSKRTVVAGATGSKVYPWTTKRLLKIGQKQVTHSFLVIPECPAPLLGRDLLTKLKAQIQFSTEGPQVTWEDRPAMCLVLNLEEEYRLHEKPVPPSIDPSWLQLFPMVWAEKAGMGLANQVPPVVVELKSDASPVAVRQYPMSKEAREGIRPHIQRFLDLGILVPCQSPWNTPLLPVKKPGTNDYRPVQDLREVNKRVQDIHPTVPNPYNLLSSLPPSHTWYSVLDLKDAFFCLKLHPNSQPLFAFEWRDPEKGNTGQLTWTRLPQGFKNSPTLFDEALHRDLASFRALNPQVVMLQYVDDLLVAAPTYRDCKEGTRRLLQELSKLGYRVSAKKAQLCREEVTYLGYLLKGGKRWLTPARKATVMKIPTPTTPRQVREFLGTAGFCRLWIPGFASLAAPLYPLTREKVPFTWTEAHQEAFGRIKEALLSAPALALPDLTKPFALYVDEKEGVARGVLTQTLGPWRRPVAYLSKKLDPVASGWPTCLKAIAAVALLLKDADKLTLGQNVLVIAPHNLESIVRQPPDRWMTNARMTHYQSLLLNERVSFAPPAILNPATLLPVESDDTPIHICSEILAEETGTRPDLRDQPLPGVPAWYTDGSSFIMDGRRQAGAAIVDNKRTVWASNLPEGTSAQKAELIALTQALRLAEGKSINIYTDSRYAFATAHVHGAIYKQRGLLTSAGKDIKNKEEILALLEAIHLPKRVAIIHCPGHQRGTDPVATGNRKADEAAKQAAQSTRILTETTKN

SEQ ID NO: 8048 - protein, 793 aa, synthetic construct
TLGDQGSRGSDPLPEPRVTLTVEGIPTEFLVNTGAEHSVLTKPMGKMGSKRTVVAGATGSKVYPWTTKRLLKIGQKQVTHSFLVIPECPAPLLGRDLLTKLKAQIQFSTEGPQVTWEDRPAMCLVLNLEEEYRLHEKPVPPSIDPSWLQLFPMVWAEKAGMGLANQVPPVVVELKSDASPVAVRQYPMSKEAREGIRPHIQRFLDLGILVPCQSPWNTPLLPVKKPGTNDYRPVQDLREVNKRVQDIHPTVPNPYNLLSSLPPSHTWYSVLDLKDAFFCLKLHPNSQPLFAFEWRDPEKGNTGQLTWTRLPQGFKNSPTLFNEALHRDLASFRALNPQVVMLQYVDDLLVAAPTYRDCKEGTRRLLQELSKLGYRVSAKKAQLCREEVTYLGYLLKGGKRWLTPARKATVMKIPTPTTPRQVREFLGTAGFCRLWIPGFASLAAPLYPLTRPKVPFTWTEAHQEAFGRIKEALLSAPALALPDLTKPFALYVDEKEGVARGVLTQTLGPWRRPVAYLSKKLDPVASGWPTCLKAIAAVALLLKDADKLTLGQNVLVIAPHNLESIVRQPPDRWMTNARMTHYQSLLLNERVSFAPPAILNPATLLPVESDDTPIHICSEILAEETGTRPDLRDQPLPGVPAWYTDGSSFIMDGRRQAGAAIVDNKRTVWASNLPEGTSAQKAELIALTQALRLAEGKSINIYTDSRYAFATAHVHGAIYKQRGWLTSAGKDIKNKEEILALLEAIHLPKRVAIIHCPGHQRGTDPVATGNRKADEAAKQAAQSTRILTETTKN

SEQ ID NO: 8049 - protein, 793 aa, synthetic construct
TLGDQGSRGSDPLPEPRVTLTVEGIPTEFLVNTGAEHSVLTKPMGKMGSKRTVVAGATGSKVYPWTTKRLLKIGQKQVTHSFLVIPECPAPLLGRDLLTKLKAQIQFSTEGPQVTWEDRPAMCLVLNLEEEYRLHEKPVPPSIDPSWLQLFPMVWAEKAGMGLANQVPPVVVELKSDASPVAVRQYPMSKEAREGIRPHIQRFLDLGILVPCQSPWNTPLLPVKKPGTNDYRPVQDLREVNKRVQDIHPTVPNPYNLLSSLPPSHTWYSVLDLKDAFFCLKLHPNSQPLFAFEWRDPEKGNTGQLTWTRLPQGFKNSPTLFNEALHRDLASFRALNPQVVMLQYVDDLLVAAPTYRDCKEGTRRLLQELSKLGYRVSAKKAQLCREEVTYLGYLLKGGKRWLTPARKATVMKIPTPTTPRQVREFLGKAGFCRLFIPGFASLAAPLYPLTRPKVPFTWTEAHQEAFGRIKEALLSAPALALPDLTKPFALYVDEKEGVARGVLTQTLGPWRRPVAYLSKKLDPVASGWPTCLKAIAAVALLLKDADKLTLGQNVLVIAPHNLESIVRQPPDRWMTNARMTHYQSLLLNERVSFAPPAILNPATLLPVESDDTPIHICSEILAEETGTRPDLRDQPLPGVPAWYTDGSSFIMDGRRQAGAAIVDNKRTVWASNLPEGTSAQKAELIALTQALRLAEGKSINIYTDSRYAFATAHVHGAIYKQRGWLTSAGKDIKNKEEILALLEAIHLPKRVAIIHCPGHQRGTDPVATGNRKADEAAKQAAQSTRILTETTKN

SEQ ID NO: 8050 - protein, 702 aa, Koala retrovirus
LLGRDLLTKLKAQIQFSTEGPQVTWEDRPAMCLVLNLEEEYRLHEKPVPPSIDPSWLQLFPMVWAEKAGMGLANQVPPVVVELKSDASPVAVRQYPMSKEAREGIRPHIQRFLDLGILVPCQSPWNTPLLPVKKPGTNDYRPVQDLREVNKRVQDIHPTVPNPYNLLSSLPPSHTWYSVLDLKDAFFCLKLHPNSQPLFAFEWRDPEKGNTGQLTWTRLPQGFKNSPTLFDEALHRDLASFRALNPQVVMLQYVDDLLVAAPTYRDCKEGTRRLLQELSKLGYRVSAKKAQLCREEVTYLGYLLKGGKRWLTPARKATVMKIPTPTTPRQVREFLGTAGFCRLWIPGFASLAAPLYPLTREKVPFTWTEAHQEAFGRIKEALLSAPALALPDLTKPFALYVDEKEGVARGVLTQTLGPWRRPVAYLSKKLDPVASGWPTCLKAIAAVALLLKDADKLTLGQNVLVIAPHNLESIVRQPPDRWMTNARMTHYQSLLLNERVSFAPPAILNPATLLPVESDDTPIHICSEILAEETGTRPDLRDQPLPGVPAWYTDGSSFIMDGRRQAGAAIVDNKRTVWASNLPEGTSAQKAELIALTQALRLAEGKSINIYTDSRYAFATAHVHGAIYKQRGLLTSAGKDIKNKEEILALLEAIHLPKRVAIIHCPGHQRGTDPVATGNRKADEAAKQAAQSTRILTETTKN

SEQ ID NO: 8051 - protein, 702 aa, synthetic construct
LLGRDLLTKLKAQIQFSTEGPQVTWEDRPAMCLVLNLEEEYRLHEKPVPPSIDPSWLQLFPMVWAEKAGMGLANQVPPVVVELKSDASPVAVRQYPMSKEAREGIRPHIQRFLDLGILVPCQSPWNTPLLPVKKPGTNDYRPVQDLREVNKRVQDIHPTVPNPYNLLSSLPPSHTWYSVLDLKDAFFCLKLHPNSQPLFAFEWRDPEKGNTGQLTWTRLPQGFKNSPTLFNEALHRDLASFRALNPQVVMLQYVDDLLVAAPTYRDCKEGTRRLLQELSKLGYRVSAKKAQLCREEVTYLGYLLKGGKRWLTPARKATVMKIPTPTTPRQVREFLGTAGFCRLWIPGFASLAAPLYPLTRPKVPFTWTEAHQEAFGRIKEALLSAPALALPDLTKPFALYVDEKEGVARGVLTQTLGPWRRPVAYLSKKLDPVASGWPTCLKAIAAVALLLKDADKLTLGQNVLVIAPHNLESIVRQPPDRWMTNARMTHYQSLLLNERVSFAPPAILNPATLLPVESDDTPIHICSEILAEETGTRPDLRDQPLPGVPAWYTDGSSFIMDGRRQAGAAIVDNKRTVWASNLPEGTSAQKAELIALTQALRLAEGKSINIYTDSRYAFATAHVHGAIYKQRGWLTSAGKDIKNKEEILALLEAIHLPKRVAIIHCPGHQRGTDPVATGNRKADEAAKQAAQSTRILTETTKN

SEQ ID NO: 8052 - protein, 702 aa, synthetic construct
LLGRDLLTKLKAQIQFSTEGPQVTWEDRPAMCLVLNLEEEYRLHEKPVPPSIDPSWLQLFPMVWAEKAGMGLANQVPPVVVELKSDASPVAVRQYPMSKEAREGIRPHIQRFLDLGILVPCQSPWNTPLLPVKKPGTNDYRPVQDLREVNKRVQDIHPTVPNPYNLLSSLPPSHTWYSVLDLKDAFFCLKLHPNSQPLFAFEWRDPEKGNTGQLTWTRLPQGFKNSPTLFNEALHRDLASFRALNPQVVMLQYVDDLLVAAPTYRDCKEGTRRLLQELSKLGYRVSAKKAQLCREEVTYLGYLLKGGKRWLTPARKATVMKIPTPTTPRQVREFLGKAGFCRLFIPGFASLAAPLYPLTRPKVPFTWTEAHQEAFGRIKEALLSAPALALPDLTKPFALYVDEKEGVARGVLTQTLGPWRRPVAYLSKKLDPVASGWPTCLKAIAAVALLLKDADKLTLGQNVLVIAPHNLESIVRQPPDRWMTNARMTHYQSLLLNERVSFAPPAILNPATLLPVESDDTPIHICSEILAEETGTRPDLRDQPLPGVPAWYTDGSSFIMDGRRQAGAAIVDNKRTVWASNLPEGTSAQKAELIALTQALRLAEGKSINIYTDSRYAFATAHVHGAIYKQRGWLTSAGKDIKNKEEILALLEAIHLPKRVAIIHCPGHQRGTDPVATGNRKADEAAKQAAQSTRILTETTKN

SEQ ID NO: 8053 - protein, 671 aa, unidentified
TLNLEDEYRLYETSAEPEVSPGSTWLSDFPQAWAETGGMGLAVRQAPLIIPLKATSTPVSIKQYPMSQEAKLGIKPHIQRLLDQGILVPCQSPWNTPLLPVKKPGTNDYRPVQDLREVNKRVEDIHPTVPNPYNLLSGLPPSHRWYTVLDLKDAFFCLRLHPTSQPLFAFEWRDPGMGISGQLTWTRLPQGFKNSPTLFDEALHRDLADFRIQHPDLILLQYVDDILLAATSELDCQQGTRALLLTLGNLGYRASAKKAQLCQKQVKYLGYLLKEGQRWLTEARKETVMGQPTPKTPRQLREFLGTAGFCRLWIPGFAEMAAPLYPLTKTGTLFNWGPDQQKAYQEIKQALLTAPALGLPDLTKPFELFVDEKQGYAKGVLTQKLGPWRRPVAYLSKKLDPVAAGWPPCLRMVAAIAVLRKDAGKLTMGQPLVILAPHAVEALVKQPPDRWLSNARMTHYQAMLLDTDRVQFGPVVALNPATLLPLPEEGAPHDCLEILAETHGTRPDLTDQPIPDADHTWYTDGSSFLQEGQRKAGAAVTTETEVIWARALPAGTSAQRAELIALTQALKMAEGKRLNVYTDSRYAFATAHIHGEIYRRRGLLTSEGREIKNKSEILALLKALFLPKRLSIIHCLGHQKGDSAEARGNRLADQAAREAAIKTPPDTSTLL

SEQ ID NO: 8054 - protein, 671 aa, synthetic construct
TLNLEDEYRLYETSAEPEVSPGSTWLSDFPQAWAETGGMGLAVRQAPLIIPLKATSTPVSIKQYPMSQEAKLGIKPHIQRLLDQGILVPCQSPWNTPLLPVKKPGTNDYRPVQDLREVNKRVEDIHPTVPNPYNLLSGLPPSHRWYTVLDLKDAFFCLRLHPTSQPLFAFEWRDPGMGISGQLTWTRLPQGFKNSPTLFNEALHRDLADFRIQHPDLILLQYVDDILLAATSELDCQQGTRALLLTLGNLGYRASAKKAQLCQKQVKYLGYLLKEGQRWLTEARKETVMGQPTPKTPRQLREFLGTAGFCRLWIPGFAEMAAPLYPLTKPGTLFNWGPDQQKAYQEIKQALLTAPALGLPDLTKPFELFVDEKQGYAKGVLTQKLGPWRRPVAYLSKKLDPVAAGWPPCLRMVAAIAVLRKDAGKLTMGQPLVILAPHAVEALVKQPPDRWLSNARMTHYQAMLLDTDRVQFGPVVALNPATLLPLPEEGAPHDCLEILAETHGTRPDLTDQPIPDADHTWYTDGSSFLQEGQRKAGAAVTTETEVIWARALPAGTSAQRAELIALTQALKMAEGKRLNVYTDSRYAFATAHIHGEIYRRRGWLTSEGREIKNKSEILALLKALFLPKRLSIIHCLGHQKGDSAEARGNRLADQAAREAAIKTPPDTSTLL

SEQ ID NO: 8055 - protein, 671 aa, synthetic construct
TLNLEDEYRLYETSAEPEVSPGSTWLSDFPQAWAETGGMGLAVRQAPLIIPLKATSTPVSIKQYPMSQEAKLGIKPHIQRLLDQGILVPCQSPWNTPLLPVKKPGTNDYRPVQDLREVNKRVEDIHPTVPNPYNLLSGLPPSHRWYTVLDLKDAFFCLRLHPTSQPLFAFEWRDPGMGISGQLTWTRLPQGFKNSPTLFNEALHRDLADFRIQHPDLILLQYVDDILLAATSELDCQQGTRALLLTLGNLGYRASAKKAQLCQKQVKYLGYLLKEGQRWLTEARKETVMGQPTPKTPRQLREFLGKAGFCRLFIPGFAEMAAPLYPLTKPGTLFNWGPDQQKAYQEIKQALLTAPALGLPDLTKPFELFVDEKQGYAKGVLTQKLGPWRRPVAYLSKKLDPVAAGWPPCLRMVAAIAVLRKDAGKLTMGQPLVILAPHAVEALVKQPPDRWLSNARMTHYQAMLLDTDRVQFGPVVALNPATLLPLPEEGAPHDCLEILAETHGTRPDLTDQPIPDADHTWYTDGSSFLQEGQRKAGAAVTTETEVIWARALPAGTSAQRAELIALTQALKMAEGKRLNVYTDSRYAFATAHIHGEIYRRRGWLTSEGREIKNKSEILALLKALFLPKRLSIIHCLGHQKGDSAEARGNRLADQAAREAAIKTPPDTSTLL

SEQ ID NO: 8056 - protein, 671 aa, Murine leukemia virus
TLGIEDEYRLHETSTEPDVSLGSTWLSDFPQAWAETGGMGLAVRQAPLIIPLKATSTPVSIQQYPMSHEARLGIKPHIQRLLDQGILVPCQSPWNTPLLPVKKPGTNDYRPVQDLREVNKRVEDIHPTVPNPYNLLSGLPPSHQWYTVLDLKDAFFCLRLHPTSQPLFAFEWRDPGMGISGQLTWTRLPQGFKNSPTLFDEALHRDLADFRIQHPDLILLQYVDDILLAATSELDCQQGTRALLQTLGDLGYRASAKKAQICQKQVKYLGYLLREGQRWLTEARKETVMGQPVPKTPRQLREFLGTAGFCRLWIPGFAEMAAPLYPLTKTGTLFSWGPDQQKAYQEIKQALLTAPALGLPDLTKPFELFVDEKQGYAKGVLTQKLGPWRRPVAYLSKKLDPVAAGWPPCLRMVAAIAVLTKDAGKLTMGQPLVILAPHAVEALVKQPPDRWLSNARMTHYQAMLLDTDRVQFGPVVALNPATLLPLPEEGAPHDCLEILAETHGTRPDLTDQPIPDADHTWYTDGSSFLQEGQRKAGAAVTTETEVIWAGALPAGTSAQRAELIALTQALKMAEGKRLNVYTDSRYAFATAHIHGEIYRRRGLLTSEGREIKNKSEILALLKALFLPKRLSIIHCLGHQKGDSAEARGNRLADQAAREAAIKTPPDTSTLL

SEQ ID NO: 8057 - protein, 671 aa, Murine leukemia virus; identical to SEQ ID NO: 8056

SEQ ID NO: 8058 - protein, 671 aa, synthetic construct
TLGIEDEYRLHETSTEPDVSLGSTWLSDFPQAWAETGGMGLAVRQAPLIIPLKATSTPVSIQQYPMSHEARLGIKPHIQRLLDQGILVPCQSPWNTPLLPVKKPGTNDYRPVQDLREVNKRVEDIHPTVPNPYNLLSGLPPSHQWYTVLDLKDAFFCLRLHPTSQPLFAFEWRDPGMGISGQLTWTRLPQGFKNSPTLFNEALHRDLADFRIQHPDLILLQYVDDILLAATSELDCQQGTRALLQTLGDLGYRASAKKAQICQKQVKYLGYLLREGQRWLTEARKETVMGQPVPKTPRQLREFLGTAGFCRLWIPGFAEMAAPLYPLTKPGTLFSWGPDQQKAYQEIKQALLTAPALGLPDLTKPFELFVDEKQGYAKGVLTQKLGPWRRPVAYLSKKLDPVAAGWPPCLRMVAAIAVLTKDAGKLTMGQPLVILAPHAVEALVKQPPDRWLSNARMTHYQAMLLDTDRVQFGPVVALNPATLLPLPEEGAPHDCLEILAETHGTRPDLTDQPIPDADHTWYTDGSSFLQEGQRKAGAAVTTETEVIWAGALPAGTSAQRAELIALTQALKMAEGKRLNVYTDSRYAFATAHIHGEIYRRRGWLTSEGREIKNKSEILALLKALFLPKRLSIIHCLGHQKGDSAEARGNRLADQAAREAAIKTPPDTSTLL

SEQ ID NO: 8059 - protein, 671 aa, synthetic construct; identical to SEQ ID NO: 8058

SEQ ID NO: 8060 - protein, 671 aa, synthetic construct
LGIEDEYRLHETSTEPDVSLGSTWLSDFPQAWAETGGMGLAVRQAPLIIPLKATSTPVSIQQYPMSHEARLGIKPHIQRLLDQGILVPCQSPWNTPLLPVKKPGTNDYRPVQDLREVNKRVEDIHPTVPNPYNLLSGLPPSHQWYTVLDLKDAFFCLRLHPTSQPLFAFEWRDPGMGISGQLTWTRLPQGFKNSPTLFNEALHRDLADFRIQHPDLILLQYVDDILLAATSELDCQQGTRALLQTLGDLGYRASAKKAQICQKQVKYLGYLLREGQRWLTEARKETVMGQPVPKTPRQLREFLGKAGFCRLFIPGFAEMAAPLYPLTKPGTLFSWGPDQQKAYQEIKQALLTAPALGLPDLTKPFELFVDEKQGYAKGVLTQKLGPWRRPVAYLSKKLDPVAAGWPPCLRMVAAIAVLTKDAGKLTMGQPLVILAPHAVEALVKQPPDRWLSNARMTHYQAMLLDTDRVQFGPVVALNPATLLPLPEEGAPHDCLEILAETHGTRPDLTDQPIPDADHTWYTDGSSFLQEGQRKAGAAVTTETEVIWAGALPAGTSAQRAELIALTQALKMAEGKRLNVYTDSRYAFATAHIHGEIYRRRGWLTSEGREIKNKSEILALLKALFLPKRLSIIHCLGHQKGDSAEARGNRLADQAAREAAIKTPPDTSTLLI

SEQ ID NO: 8061 - protein, 671 aa, synthetic construct; identical to SEQ ID NO: 8060

SEQ ID NO: 8062 - protein, 671 aa, unidentified
TLNIEDEYRLHETSKEPDVSLGSTWLSDFPQAWAETGGMGLAVRQAPLIIPLKATSTPVSIKQYPMSQEARLGIKPHIQRLLDQGILVPCQSPWNTPLLPVKKPGTNDYRPVQDLREVNKRVEDIHPTVPNPYNLLSGLPPSHQWYTVLDLKDAFFCLRLHPTSQPLFAFEWRDPEMGISGQLTWTRLPQGFKNSPTLFDEALHRDLAGFRIQHPDLILLQYVDDLLLAATSELDCQQGTRALLQTLGDLGYRASAKKAQICQKQVKYLGYLLKEGQRWLTEARKETVMGQPIPKTPRQLREFLGTAGFCRLWIPGFAEMAAPLYPLTKTGTLFNWGPDQQKAFQEIKQALLTAPALGLPDLTKPFELFVDEKQGYAKGVLTQKLGPWRRPVAYLSKKLDPVAAGWPPCLRMVAAIAVLTKDAGKLTMGQPLVILAPHAVEALVKQPPDRWLSNARMTHYQALLLDTDRVQFGPVVALNPATLLPLPEEGLQHDCLDILAEAHGTRSDLMDQPLPDADHTWYTDGSSFLQEGQRKAGAAVTTETEVIWARALPAGTSAQRAELIALTQALKMAEGKKLNVYTDSRYAFATAHIHGEIYRRRGLLTSEGKEIKNKDEILALLKALFLPKRLSIIHCPGHQKGNSAEARGNRMADQAAREVATRETPETSTLL

SEQ ID NO: 8063 - protein, 671 aa, synthetic construct
TLNIEDEYRLHETSKEPDVSLGSTWLSDFPQAWAETGGMGLAVRQAPLIIPLKATSTPVSIKQYPMSQEARLGIKPHIQRLLDQGILVPCQSPWNTPLLPVKKPGTNDYRPVQDLREVNKRVEDIHPTVPNPYNLLSGLPPSHQWYTVLDLKDAFFCLRLHPTSQPLFAFEWRDPEMGISGQLTWTRLPQGFKNSPTLFNEALHRDLAGFRIQHPDLILLQYVDDLLLAATSELDCQQGTRALLQTLGDLGYRASAKKAQICQKQVKYLGYLLKEGQRWLTEARKETVMGQPIPKTPRQLREFLGTAGFCRLWIPGFAEMAAPLYPLTKPGTLFNWGPDQQKAFQEIKQALLTAPALGLPDLTKPFELFVDEKQGYAKGVLTQKLGPWRRPVAYLSKKLDPVAAGWPPCLRMVAAIAVLTKDAGKLTMGQPLVILAPHAVEALVKQPPDRWLSNARMTHYQALLLDTDRVQFGPVVALNPATLLPLPEEGLQHDCLDILAEAHGTRSDLMDQPLPDADHTWYTDGSSFLQEGQRKAGAAVTTETEVIWARALPAGTSAQRAELIALTQALKMAEGKKLNVYTDSRYAFATAHIHGEIYRRRGWLTSEGKEIKNKDEILALLKALFLPKRLSIIHCPGHQKGNSAEARGNRMADQAAREVATRETPETSTLL

SEQ ID NO: 8064 - protein, 671 aa, synthetic construct
TLNIEDEYRLHETSKEPDVSLGSTWLSDFPQAWAETGGMGLAVRQAPLIIPLKATSTPVSIKQYPMSQEARLGIKPHIQRLLDQGILVPCQSPWNTPLLPVKKPGTNDYRPVQDLREVNKRVEDIHPTVPNPYNLLSGLPPSHQWYTVLDLKDAFFCLRLHPTSQPLFAFEWRDPEMGISGQLTWTRLPQGFKNSPTLFNEALHRDLAGFRIQHPDLILLQYVDDLLLAATSELDCQQGTRALLQTLGDLGYRASAKKAQICQKQVKYLGYLLKEGQRWLTEARKETVMGQPIPKTPRQLREFLGKAGFCRLFIPGFAEMAAPLYPLTKPGTLFNWGPDQQKAFQEIKQALLTAPALGLPDLTKPFELFVDEKQGYAKGVLTQKLGPWRRPVAYLSKKLDPVAAGWPPCLRMVAAIAVLTKDAGKLTMGQPLVILAPHAVEALVKQPPDRWLSNARMTHYQALLLDTDRVQFGPVVALNPATLLPLPEEGLQHDCLDILAEAHGTRSDLMDQPLPDADHTWYTDGSSFLQEGQRKAGAAVTTETEVIWARALPAGTSAQRAELIALTQALKMAEGKKLNVYTDSRYAFATAHIHGEIYRRRGWLTSEGKEIKNKDEILALLKALFLPKRLSIIHCPGHQKGNSAEARGNRMADQAAREVATRETPETSTLL

SEQ ID NO: 8065 - protein, 671 aa, unidentified
TLNIEDEYRLHETSKGPDVPLGSTWLSDFPQAWAETGGMGLAFRQAPLIISLKATSTPVSIKQYPMSQEARLGIKPHIQRLLDQGILVPCQSPWNTPLLPVKKPGTNDYRPVQDLREVNKRVEDIHPTVPNPYNLLSGLPPSHQWYTVLDLKDAFFCLRLHPTSQSLFAFEWKDPEMGISGQLTWTRLPQGFKNSPTLFDEALHRDLADFRIQHPDLILLQYVDDLLLAATSELDCQQGTRALLQTLGDLGYRASAKKAQICQKQVKYLGYLLKEGQRWLTEARKETVMGQPTPKTPRQLREFLGTAGLCRLWIPGFAEMAAPLYPLTKTGTLFKWGPDQQKAYQEIKQALLTAPALGLPDLTKPFELFVDEKQGYAKGVLTQKLGPWRRPVAYLSKKLDPVAAGWPPCLRMVAAIAVLTKDVGKLTMGQPLVILAPHAVEALVKQPPDRWLSNARMTHYQALLLDTDRVQFGPIVALNPATLLPLPEEGLQHDCLDILAEAHGTRPDLTDQPLPDADHTWYTDGSSFLQEGQRRAGAAVTTETEVIWAKALPAGTSAQRAELIALTQALKMAAGKKLNVYTDSRYAFATAHIHGEIYRRRGLLTSEGKEIKNKDEILALLKALFLPKRLSIIHCPGHQKGNHAEARGNRMADQAAREVATRETPETSTLL

SEQ ID NO: 8066 - protein, 671 aa, synthetic construct
TLNIEDEYRLHETSKGPDVPLGSTWLSDFPQAWAETGGMGLAFRQAPLIISLKATSTPVSIKQYPMSQEARLGIKPHIQRLLDQGILVPCQSPWNTPLLPVKKPGTNDYRPVQDLREVNKRVEDIHPTVPNPYNLLSGLPPSHQWYTVLDLKDAFFCLRLHPTSQSLFAFEWKDPEMGISGQLTWTRLPQGFKNSPTLFNEALHRDLADFRIQHPDLILLQYVDDLLLAATSELDCQQGTRALLQTLGDLGYRASAKKAQICQKQVKYLGYLLKEGQRWLTEARKETVMGQPTPKTPRQLREFLGTAGLCRLWIPGFAEMAAPLYPLTKPGTLFKWGPDQQKAYQEIKQALLTAPALGLPDLTKPFELFVDEKQGYAKGVLTQKLGPWRRPVAYLSKKLDPVAAGWPPCLRMVAAIAVLTKDVGKLTMGQPLVILAPHAVEALVKQPPDRWLSNARMTHYQALLLDTDRVQFGPIVALNPATLLPLPEEGLQHDCLDILAEAHGTRPDLTDQPLPDADHTWYTDGSSFLQEGQRRAGAAVTTETEVIWAKALPAGTSAQRAELIALTQALKMAAGKKLNVYTDSRYAFATAHIHGEIYRRRGWLTSEGKEIKNKDEILALLKALFLPKRLSIIHCPGHQKGNHAEARGNRMADQAAREVATRETPETSTLL

SEQ ID NO: 8067 - protein, 671 aa, synthetic construct
TLNIEDEYRLHETSKGPDVPLGSTWLSDFPQAWAETGGMGLAFRQAPLIISLKATSTPVSIKQYPMSQEARLGIKPHIQRLLDQGILVPCQSPWNTPLLPVKKPGTNDYRPVQDLREVNKRVEDIHPTVPNPYNLLSGLPPSHQWYTVLDLKDAFFCLRLHPTSQSLFAFEWKDPEMGISGQLTWTRLPQGFKNSPTLFNEALHRDLADFRIQHPDLILLQYVDDLLLAATSELDCQQGTRALLQTLGDLGYRASAKKAQICQKQVKYLGYLLKEGQRWLTEARKETVMGQPTPKTPRQLREFLGKAGLCRLFIPGFAEMAAPLYPLTKPGTLFKWGPDQQKAYQEIKQALLTAPALGLPDLTKPFELFVDEKQGYAKGVLTQKLGPWRRPVAYLSKKLDPVAAGWPPCLRMVAAIAVLTKDVGKLTMGQPLVILAPHAVEALVKQPPDRWLSNARMTHYQALLLDTDRVQFGPIVALNPATLLPLPEEGLQHDCLDILAEAHGTRPDLTDQPLPDADHTWYTDGSSFLQEGQRRAGAAVTTETEVIWAKALPAGTSAQRAELIALTQALKMAAGKKLNVYTDSRYAFATAHIHGEIYRRRGWLTSEGKEIKNKDEILALLKALFLPKRLSIIHCPGHQKGNHAEARGNRMADQAAREVATRETPETSTLL

SEQ ID NO: 8068 - protein, 671 aa, synthetic construct
TLNIEDEYRLHETSKGPDVPLGSTWLSDFPQAWAETGGMGLAVRQAPLIIPLKATSTPVSIKQYPMSQEARLGIKPHIQRLLDQGILVPCQSPWNTPLLPVKKPGTNDYRPVQDLREVNKRVEDIHPTVPNPYNLLSGLPPSHQWYTVLDLKDAFFCLRLHPTSQSLFAFEWRDPEMGISGQLTWTRLPQGFKNSPTLFNEALHRDLADFRIQHPDLILLQYVDDLLLAATSELDCQQGTRALLQTLGDLGYRASAKKAQICQKQVKYLGYLLKEGQRWLTEARKETVMGQPTPKTPRQLREFLGTAGFCRLWIPGFAEMAAPLYPLTKPGTLFEWGPDQQKAYQEIKQALLTAPALGLPDLTKPFELFVDEKQGYAKGVLTQKLGPWRRPVAYLSKKLDPVAAGWPPCLRMVAAIAVLTKDAGKLTMGQPLVILAPHAVEALVKQPPDRWLSNARMTHYQALLLDTDRVQFGPIVALNPATLLPLPEEGLQHDCLDILAEAHGTRPDLTDQPLPDADHTWYTDGSSFLQEGQRKAGAAVTTETEVVWAKALPAGTSAQRAELIALTQALKMAEGKKLNVYTDSRYAFATAHIHGEIYRRRGWLTSEGKEIKNKDEILALLKALFLPKRLSIIHCPGHQKGNRAEARGNRMADQAAREVATRETPETSTLL

SEQ ID NO: 8069 - protein, 671 aa, synthetic construct
TLNIEDEYRLHETSKGPDVPLGSTWLSDFPQAWAETGGMGLAVRQAPLIIPLKATSTPVSIKQYPMSQEARLGIKPHIQRLLDQGILVPCQSPWNTPLLPVKKPGTNDYRPVQDLREVNKRVEDIHPTVPNPYNLLSGLPPSHQWYTVLDLKDAFFCLRLHPTSQSLFAFEWRDPEMGISGQLTWTRLPQGFKNSPTLFNEALHRDLADFRIQHPDLILLQYVDDLLLAATSELDCQQGTRALLQTLGDLGYRASAKKAQICQKQVKYLGYLLKEGQRWLTEARKETVMGQPTPKTPRQLREFLGKAGFCRLFIPGFAEMAAPLYPLTKPGTLFEWGPDQQKAYQEIKQALLTAPALGLPDLTKPFELFVDEKQGYAKGVLTQKLGPWRRPVAYLSKKLDPVAAGWPPCLRMVAAIAVLTKDAGKLTMGQPLVILAPHAVEALVKQPPDRWLSNARMTHYQALLLDTDRVQFGPIVALNPATLLPLPEEGLQHDCLDILAEAHGTRPDLTDQPLPDADHTWYTDGSSFLQEGQRKAGAAVTTETEVVWAKALPAGTSAQRAELIALTQALKMAEGKKLNVYTDSRYAFATAHIHGEIYRRRGWLTSEGKEIKNKDEILALLKALFLPKRLSIIHCPGHQKGNRAEARGNRMADQAAREVATRETPETSTLL

SEQ ID NO: 8070 - protein, 671 aa, Murine leukemia virus; identical to SEQ ID NO: 5003

SEQ ID NO: 8071 - protein, 671 aa, Murine leukemia virus; identical to SEQ ID NO: 5003

SEQ ID NO: 8072 - protein, 671 aa, synthetic construct
TLNIEDEHRLHETSKEPDVSLGSTWLSDFPQAWAETGGMGLAVRQAPLIIPLKATSTPVSIKQYPMSQEARLGIKPHIQRLLDQGILVPCQSPWNTPLLPVKKPGTNDYRPVQDLREVNKRVEDIHPTVPNPYNLLSGLPPSHQWYTVLDLKDAFFCLRLHPTSQPLFAFEWRDPEMGISGQLTWTRLPQGFKNSPTLFNEALHRDLADFRIQHPDLILLQYVDDLLLAATSELDCQQGTRALLQTLGNLGYRASAKKAQICQKQVKYLGYLLKEGQRWLTEARKETVMGQPTPKTPRQLREFLGTAGFCRLWIPGFAEMAAPLYPLTKPGTLFNWGPDQQKAYQEIKQALLTAPALGLPDLTKPFELFVDEKQGYAKGVLTQKLGPWRRPVAYLSKKLDPVAAGWPPCLRMVAAIAVLTKDAGKLTMGQPLVILAPHAVEALVKQPPDRWLSNARMTHYQALLLDTDRVQFGPVVALNPATLLPLPEEGLQHNCLDILAEAHGTRPDLTDQPLPDADHTWYTDGSSLLQEGQRKAGAAVTTETEVIWAKALPAGTSAQRAELIALTQALKMAEGKKLNVYTDSRYAFATAHIHGEIYRRRGWLTSEGKEIKNKDEILALLKALFLPKRLSIIHCPGHQKGHSAEARGNRMADQAARKAAITETPDTSTLL

SEQ ID NO: 8073 - protein, 671 aa, synthetic construct; identical to SEQ ID NO: 8072

SEQ ID NO: 8074 - protein, 671 aa, synthetic construct
TLNIEDEHRLHETSKEPDVSLGSTWLSDFPQAWAETGGMGLAVRQAPLIIPLKATSTPVSIKQYPMSQEARLGIKPHIQRLLDQGILVPCQSPWNTPLLPVKKPGTNDYRPVQDLREVNKRVEDIHPTVPNPYNLLSGLPPSHQWYTVLDLKDAFFCLRLHPTSQPLFAFEWRDPEMGISGQLTWTRLPQGFKNSPTLFNEALHRDLADFRIQHPDLILLQYVDDLLLAATSELDCQQGTRALLQTLGNLGYRASAKKAQICQKQVKYLGYLLKEGQRWLTEARKETVMGQPTPKTPRQLREFLGKAGFCRLFIPGFAEMAAPLYPLTKPGTLFNWGPDQQKAYQEIKQALLTAPALGLPDLTKPFELFVDEKQGYAKGVLTQKLGPWRRPVAYLSKKLDPVAAGWPPCLRMVAAIAVLTKDAGKLTMGQPLVILAPHAVEALVKQPPDRWLSNARMTHYQALLLDTDRVQFGPVVALNPATLLPLPEEGLQHNCLDILAEAHGTRPDLTDQPLPDADHTWYTDGSSLLQEGQRKAGAAVTTETEVIWAKALPAGTSAQRAELIALTQALKMAEGKKLNVYTDSRYAFATAHIHGEIYRRRGWLTSEGKEIKNKDEILALLKALFLPKRLSIIHCPGHQKGHSAEARGNRMADQAARKAAITETPDTSTLL

SEQ ID NO: 8075 - protein, 671 aa, synthetic construct; identical to SEQ ID NO: 8074

SEQ ID NO: 8076 - protein, 691 aa, synthetic construct
TLNIEDEYRLHETSKEPDVSLGSTWLSDFPQAWAETGGMGLAVRQAPLIIPLKATSTPVSIKQYPMSQEARLGIKPHIQRLLDQGILVPCQSPWNTPLLPVKKPGTNDYRPVQDLREVNKRVEDIHPTVPNPYNLLSGLPPSHQWYTVLDLKDAFFCLRLHPTSQPLFAFEWRDPEMGISGQLTWTRLPQGFKNSPTLFNEALHRDLADFRIQHPDLILLQYVDDLLLAATSELDCQQGTRALLQTLGNLGYRASAKKAQICQKQVKYLGYLLKEGQRWLTEARKETVMGQPTPKTPRQLREFLGKAGFCRLFIPGFAEMAAPLYPLTKPGTLFNWGPDQQKAYQEIKQALLTAPALGLPDLTKPFELFVDEKQGYAKGVLTQKLGPWRRPVAYLSKKLDPVAAGWPPCLRMVAAIAVLTKDAGKLTMGQPLVILAPHAVEALVKQPPDRWLSNARMTHYQALLLDTDRVQFGPVVALNPATLLPLPEEGLQHNCLDILAEAHGTRPDLTDQPLPDADHTWYTDGSSLLQEGQRKAGAAVTTETEVIWAKALPAGTSAQRAELIALTQALKMAEGKKLNVYTDSRYAFATAHIHGEIYRRRGWLTSEGKEIKNKDEILALLKALFLPKRLSIIHCPGHQKGHSAEARGNRMADQAARKAAITETPDTSTLLIENSSPSGGSKRTADGSEFE

SEQ ID NO: 8077 - protein, 691 aa, synthetic construct; identical to SEQ ID NO: 8076

SEQ ID NO: 8078 - protein, 671 aa, unidentified
TLNIEDEYRLHEISTEPDVSPGSTWLSDFPQAWAETGGMGLAVRQAPLIIPLKATSTPVSIKQYPMSQEAKLGIKPHIQRLLDQGILVPCQSPWNTPLLPVKKPGTNDYRPVQGLREVNKRVEDIHPTVPNPYNLLSGLPTSHRWYTVLDLKDAFFCLRLHPTSQPLFASEWRDPGMGISGQLTWTRLPQGFKNSPTLFDEALHRGLADFRIQHPDLILLQYVDDLLLAATSELDCQQGTRALLKTLGNLGYRASAKKAQICQKQVKYLGYLLREGQRWLTEARKETVMGQPTPKTPRQLREFLGTAGFCRLWIPRFAEMAAPLYPLTKTGTLFNWGPDQQKAYHEIKQALLTAPALGLPDLTKPFELFVDEKQGYAKGVLTQKLGPWRRPVAYLSKKLDPVAAGWPPCLRMVAAIAVLTKDAGKLTMGQPLVILAPHAVEALVKQPPDRWLSNARMTHYQAMLLDTDRVQFGPVVALNPATLLPLPEEGAPHDCLEILAETHGTEPDLTDQPIPDADHTWYTDGSSFLQEGQRKAGAAVTTETEVIWARALPAGTSAQRAELIALTQALKMAEGKRLNVYTDSRYAFATAHIHGEIYKRRGLLTSEGREIKNKSEILALLKALFLPKRLSIIHCLGHQKGDSAEARGNRLADQAAREAAIKTPPDTSTLL

SEQ ID NO: 8079 - protein, 671 aa, synthetic construct
TLNIEDEYRLHEISTEPDVSPGSTWLSDFPQAWAETGGMGLAVRQAPLIIPLKATSTPVSIKQYPMSQEAKLGIKPHIQRLLDQGILVPCQSPWNTPLLPVKKPGTNDYRPVQGLREVNKRVEDIHPTVPNPYNLLSGLPTSHRWYTVLDLKDAFFCLRLHPTSQPLFASEWRDPGMGISGQLTWTRLPQGFKNSPTLFNEALHRGLADFRIQHPDLILLQYVDDLLLAATSELDCQQGTRALLKTLGNLGYRASAKKAQICQKQVKYLGYLLREGQRWLTEARKETVMGQPTPKTPRQLREFLGTAGFCRLWIPRFAEMAAPLYPLTKPGTLFNWGPDQQKAYHEIKQALLTAPALGLPDLTKPFELFVDEKQGYAKGVLTQKLGPWRRPVAYLSKKLDPVAAGWPPCLRMVAAIAVLTKDAGKLTMGQPLVILAPHAVEALVKQPPDRWLSNARMTHYQAMLLDTDRVQFGPVVALNPATLLPLPEEGAPHDCLEILAETHGTEPDLTDQPIPDADHTWYTDGSSFLQEGQRKAGAAVTTETEVIWARALPAGTSAQRAELIALTQALKMAEGKRLNVYTDSRYAFATAHIHGEIYKRRGWLTSEGREIKNKSEILALLKALFLPKRLSIIHCLGHQKGDSAEARGNRLADQAAREAAIKTPPDTSTLL

SEQ ID NO: 8080 - protein, 691 aa, Mouse mammary tumor virus
WVQEISDSRPMLHIYLNGRRFLGLLNTGADKTCIAGRDWPANWPIHQTESSLQGLGMACGVARSSQPLRWQHEDKSGIIHPFVIPTLPFTLWGRDIMKDIKVRLMTDSPDDSQDLMIGAIESNLFADQISWKSDQPVWLNQWPLKQEKLQALQQLVTEQLQLGHLEESNSPWNTPVFVIKKKSGKWRLLQDLRAVNATMHDMGALQPGLPSPVAVPKGWEIIIIDLQDCFFNIKLHPEDCKRFAFSVPSPNFKRPYQRFQWKVLPQGMKNSPTLCQKFVDKAILTVRDKYQDSYIVHYMDDILLAHPSRSIVDEILTSMIQALNKHGLVVSTEKIQKYDNLKYLGTHIQGDSVSYQKLQIRTDKLRTLNDFQKLLGNINWIRPFLKLTTGELKPLFEILNGDSNPISTRKLTPEACKALQLMNERLSTARVKRLDLSQPWSLCILKTEYTPTACLWQDGVVEWIHLPHISPKVITPYDIFCTQLIIKGRHRSKELFSKDPDYIVVPYTKVQFDLLLQEKEDWPISLLGFLGEVHFHLPKDPLLTFTLQTAIIFPHMTSTTPLEKGIVIFTDGSANGRSVTYIQGREPIIKENTQNTAQQAEIVAVITAFEEVSQPFNLYTDSKYVTGLFPEIETATLSPRTKIYTELKHLQRLIHKRQEKFYIGHIRGHTGLPGPLAQGNAYADSLTRILT

SEQ ID NO: 8081 - protein, 691 aa, Mouse mammary tumor virus; identical to SEQ ID NO: 8080

SEQ ID NO: 8082 - protein, 691 aa, synthetic construct
WVQEISDSRPMLHIYLNGRRFLGLLNTGADKTCIAGRDWPANWPIHQTESSLQGLGMACGVARSSQPLRWQHEDKSGIIHPFVIPTLPFTLWGRDIMKDIKVRLMTDSPDDSQDLMIGAIESNLFADQISWKSDQPVWLNQWPLKQEKLQALQQLVTEQLQLGHLEESNSPWNTPVFVIKKKSGKWRLLQDLRAVNATMHDMGALQPGLPSPVAVPKGWEIIIIDLQDCFFNIKLHPEDCKRFAFSVPSPNFKRPYQRFQWKVLPQGMKNSPTLCQKFVDKAILTVRDKYQDSYIVHYMDDILLAHPSRSIVDEILTSMIQALNKHGLVVSTEKIQKYDNLKYLGTHIQGDSVSYQKLQIRTDKLRTLNDFQKLLGNINWIRPFLKLTTGELKPLFEILNPDSNPISTRKLTPEACKALQLMNERLSTARVKRLDLSQPWSLCILKTEYTPTACLWQDGVVEWIHLPHISPKVITPYDIFCTQLIIKGRHRSKELFSKDPDYIVVPYTKVQFDLLLQEKEDWPISLLGFLGEVHFHLPKDPLLTFTLQTAIIFPHMTSTTPLEKGIVIFTDGSANGRSVTYIQGREPIIKENTQNTAQQAEIVAVITAFEEVSQPFNLYTDSKYVTGLFPEIETATLSPRTKIYTELKHLQRLIHKRQEKFYIGHIRGHTGLPGPLAQGNAYADSLTRILT

SEQ ID NO: 8083 - protein, 691 aa, synthetic construct
VQEISDSRPMLHIYLNGRRFLGLLDTGADKTCIAGRDWPANWPIHQTESSLQGLGMACGVARSSQPLRWQHEDKSGIIHPFVIPTLPFTLWGRDIMKDIKVRLMTDSPDDSQDLMIGAIESNLFADQISWKSDQPVWLNQWPLKQEKLQALQQLVTEQLQLGHLEESNSPWNTPVFVIKKKSGKWRLLQDLRAVNATMHDMGALQPGLPSPVAVPKGWEIIIIDLQDCFFNIKLHPEDCKRFAFSVPSPNFKRPYQRFQWKVLPQGMKNSPTLCQKFVDKAILTVRDKYQDSYIVHYMDDILLAHPSRSIVDEILTSMIQALNKHGLVVSTEKIQKYDNLKYLGTHIQGDSVSYQKLQIRTDKLRTLNDFQKLLGNINWIRPFLKLTTGELKPLFEILNPDSNPISTRKLTPEACKALQLMNERLSTARVKRLDLSQPWSLCILKTEYTPTACLWQDGVVEWIHLPHISPKVITPYDIFCTQLIIKGRHRSKELFSKDPDYIVVPYTKVQFDLLLQEKEDWPISLLGFLGEVHFHLPKDPLLTFTLQTAIIFPHMTSTTPLEKGIVIFTDGSANGRSVTYIQGREPIIKENTQNTAQQAEIVAVITAFEEVSQPFNLYTDSKYVTGLFPEIETATLSPRTKIYTELKHLQRLIHKRQEKFYIGHIRGHTGLPGPLAQGNAYADSLTRILTA

SEQ ID NO: 8084 - protein, 691 aa, synthetic construct; identical to SEQ ID NO: 8083

SEQ ID NO: 8085 - protein, 691 aa, synthetic construct
WVQEISDSRPMLHIYLNGRRFLGLLNTGADKTCIAGRDWPANWPIHQTESSLQGLGMACGVARSSQPLRWQHEDKSGIIHPFVIPTLPFTLWGRDIMKDIKVRLMTDSPDDSQDLMIGAIESNLFADQISWKSDQPVWLNQWPLKQEKLQALQQLVTEQLQLGHLEESNSPWNTPVFVIKKKSGKWRLLQDLRAVNATMHDMGALQPGLPSPVAPPKGWEIIIIDLQDCFFNIKLHPEDCKRFAFSVPSPNFKRPYQRFQWKVLPQGMKNSPTLCQKFVDKAILTVRDKYQDSYIVHYMDDILLAHPSRSIVDEILTSMIQALNKHGLVVSTEKIQKYDNLKYLGTHIQGDSVSYQKLQIRTDKLRTLNDFQKLLGNINWIRPFLKLTTGELKPLFEILNPDSNPISTRKLTPEACKALQLMNERLSTARVKRLDLSQPWSLCILKTEYTPTACLWQDGVVEWIHLPHISPKVITPYDIFCTQLIIKGRHRSKELFSKDPDYIVVPYTKVQFDLLLQEKEDWPISLLGFLGEVHFHLPKDPLLTFTLQTAIIFPHMTSTTPLEKGIVIFTDGSANGRSVTYIQGREPIIKENTQNTAQQAEIVAVITAFEEVSQPFNLYTDSKYVTGLFPEIETATLSPRTKIYTELKHLQRLIHKRQEKFYIGHIRGHTGLPGPLAQGNAYADSLTRILT

SEQ ID NO: 8086 - protein, 691 aa, synthetic construct; identical to SEQ ID NO: 8085

SEQ ID NO: 8087 - protein, 691 aa, synthetic construct
VQEISDSRPMLHIYLNGRRFLGLLDTGADKTCIAGRDWPANWPIHQTESSLQGLGMACGVARSSQPLRWQHEDKSGIIHPFVIPTLPFTLWGRDIMKDIKVRLMTDSPDDSQDLMIGAIESNLFADQISWKSDQPVWLNQWPLKQEKLQALQQLVTEQLQLGHLEESNSPWNTPVFVIKKKSGKWRLLQDLRAVNATMHDMGALQPGLPSPPAVPKGWEIIIIDLQDCFFNIKLHPEDCKRFAFSVPSPNFKRPYQRFQWKVLPQGMKNSPTLCQKFVDKAILTVRDKYQDSYIVHYMDDILLAHPSRSIVDEILTSMIQALNKHGLVVSTEKIQKYDNLKYLGTHIQGDSVSYQKLQIRTDKLRTLNDFQKLLGNINWIRPFLKLTTGELKPLFEILNPDSNPISTRKLTPEACKALQLMNERLSTARVKRLDLSQPWSLCILKTEYTPTACLWQDGVVEWIHLPHISPKVITPYDIFCTQLIIKGRHRSKELFSKDPDYIVVPYTKVQFDLLLQEKEDWPISLLGFLGEVHFHLPKDPLLTFTLQTAIIFPHMTSTTPLEKGIVIFTDGSANGRSVTYIQGREPIIKENTQNTAQQAEIVAVITAFEEVSQPFNLYTDSKYVTGLFPEIETATLSPRTKIYTELKHLQRLIHKRQEKFYIGHIRGHTGLPGPLAQGNAYADSLTRILTA

SEQ ID NO: 8088 - protein, 691 aa, synthetic construct; identical to SEQ ID NO: 8087

SEQ ID NO: 8089 - protein, 691 aa, Mouse mammary tumor virus
VQEISDSRPMLHIYLNGRRFLGLLDTGADKTCIAGRDWPANWPIHQTESSLQGLGMACGVARSSQPLRWQHEDKSGIIHPFVIPTLPFTLWGRDIMKDIKVRLMTDSPDDSQDLMIGAIESNLFADQISWKSDQPVWLNQWPLKQEKLQALQQLVTEQLQLGHLEESNSPWNTPVFVIKKKSGKWRLLQDLRAVNATMHDMGALQPGLPSPVAVPKGWEIIIIDLQDCFFNIKLHPEDCKRFAFSVPSPNFKRPYQRFQWKVLPQGMKNSPTLCQKFVDKAILTVRDKYQDSYIVHYMDDILLAHPSRSIVDEILTSMIQALNKHGLVVSTEKIQKYDNLKYLGTHIQGDSVSYQKLQIRTDKLRTLNDFQKLLGNINWIRPFLKLTTGELKPLFEILNGDSNPISTRKLTPEACKALQLMNERLSTARVKRLDLSQPWSLCILKTEYTPTACLWQDGVVEWIHLPHISPKVITPYDIFCTQLIIKGRHRSKELFSKDPDYIVVPYTKVQFDLLLQEKEDWPISLLGFLGEVHFHLPKDPLLTFTLQTAIIFPHMTSTTPLEKGIVIFTDGSANGRSVTYIQGREPIIKENTQNTAQQAEIVAVITAFEEVSQPFNLYTDSKYVTGLFPEIETATLSPRTKIYTELKHLQRLIHKRQEKFYIGHIRGHTGLPGPLAQGNAYADSLTRILTA

SEQ ID NO: 8090 - protein, 691 aa, Mouse mammary tumor virus; identical to SEQ ID NO: 8089

SEQ ID NO: 8091 - protein, 599 aa, Mouse mammary tumor virus
GRDIMKDIKVRLMTDSPDDSQDLMIGAIESNLFADQISWKSDQPVWLNQWPLKQEKLQALQQLVTEQLQLGHLEESNSPWNTPVFVIKKKSGKWRLLQDLRAVNATMHDMGALQPGLPSPVAVPKGWEIIIIDLQDCFFNIKLHPEDCKRFAFSVPSPNFKRPYQRFQWKVLPQGMKNSPTLCQKFVDKAILTVRDKYQDSYIVHYMDDILLAHPSRSIVDEILTSMIQALNKHGLVVSTEKIQKYDNLKYLGTHIQGDSVSYQKLQIRTDKLRTLNDFQKLLGNINWIRPFLKLTTGELKPLFEILNGDSNPISTRKLTPEACKALQLMNERLSTARVKRLDLSQPWSLCILKTEYTPTACLWQDGVVEWIHLPHISPKVITPYDIFCTQLIIKGRHRSKELFSKDPDYIVVPYTKVQFDLLLQEKEDWPISLLGFLGEVHFHLPKDPLLTFTLQTAIIFPHMTSTTPLEKGIVIFTDGSANGRSVTYIQGREPIIKENTQNTAQQAEIVAVITAFEEVSQPFNLYTDSKYVTGLFPEIETATLSPRTKIYTELKHLQRLIHKRQEKFYIGHIRGHTGLPGPLAQGNAYADSLTRILT

SEQ ID NO: 8092 - protein, 599 aa, Mouse mammary tumor virus; identical to SEQ ID NO: 8091

SEQ ID NO: 8093 - protein, 599 aa, synthetic construct
GRDIMKDIKVRLMTDSPDDSQDLMIGAIESNLFADQISWKSDQPVWLNQWPLKQEKLQALQQLVTEQLQLGHLEESNSPWNTPVFVIKKKSGKWRLLQDLRAVNATMHDMGALQPGLPSPVAVPKGWEIIIIDLQDCFFNIKLHPEDCKRFAFSVPSPNFKRPYQRFQWKVLPQGMKNSPTLCQKFVDKAILTVRDKYQDSYIVHYMDDILLAHPSRSIVDEILTSMIQALNKHGLVVSTEKIQKYDNLKYLGTHIQGDSVSYQKLQIRTDKLRTLNDFQKLLGNINWIRPFLKLTTGELKPLFEILNPDSNPISTRKLTPEACKALQLMNERLSTARVKRLDLSQPWSLCILKTEYTPTACLWQDGVVEWIHLPHISPKVITPYDIFCTQLIIKGRHRSKELFSKDPDYIVVPYTKVQFDLLLQEKEDWPISLLGFLGEVHFHLPKDPLLTFTLQTAIIFPHMTSTTPLEKGIVIFTDGSANGRSVTYIQGREPIIKENTQNTAQQAEIVAVITAFEEVSQPFNLYTDSKYVTGLFPEIETATLSPRTKIYTELKHLQRLIHKRQEKFYIGHIRGHTGLPGPLAQGNAYADSLTRILT

SEQ ID NO: 8094 - protein, 599 aa, synthetic construct; identical to SEQ ID NO: 8093

SEQ ID NO: 8095 - protein, 599 aa, synthetic construct
GRDIMKDIKVRLMTDSPDDSQDLMIGAIESNLFADQISWKSDQPVWLNQWPLKQEKLQALQQLVTEQLQLGHLEESNSPWNTPVFVIKKKSGKWRLLQDLRAVNATMHDMGALQPGLPSPVAPPKGWEIIIIDLQDCFFNIKLHPEDCKRFAFSVPSPNFKRPYQRFQWKVLPQGMKNSPTLCQKFVDKAILTVRDKYQDSYIVHYMDDILLAHPSRSIVDEILTSMIQALNKHGLVVSTEKIQKYDNLKYLGTHIQGDSVSYQKLQIRTDKLRTLNDFQKLLGNINWIRPFLKLTTGELKPLFEILNPDSNPISTRKLTPEACKALQLMNERLSTARVKRLDLSQPWSLCILKTEYTPTACLWQDGVVEWIHLPHISPKVITPYDIFCTQLIIKGRHRSKELFSKDPDYIVVPYTKVQFDLLLQEKEDWPISLLGFLGEVHFHLPKDPLLTFTLQTAIIFPHMTSTTPLEKGIVIFTDGSANGRSVTYIQGREPIIKENTQNTAQQAEIVAVITAFEEVSQPFNLYTDSKYVTGLFPEIETATLSPRTKIYTELKHLQRLIHKRQEKFYIGHIRGHTGLPGPLAQGNAYADSLTRILT

SEQ ID NO: 8096 - protein, 599 aa, synthetic construct; identical to SEQ ID NO: 8095

SEQ ID NO: 8097 - protein, 585 aa, Mason-Pfizer monkey virus
LTAAIDILAPQQCAEPITWKSDEPVWVDQWPLTNDKLAAAQQLVQEQLEAGHITESSSPWNTPIFVIKKKSGKWRLLQDLRAVNATMVLMGALQPGLPSPVAIPQGYLKIIIDLKDCFFSIPLHPSDQKRFAFSLPSTNFKEPMQRFQWKVLPQGMANSPTLCQKYVATAIHKVRHAWKQMYIIHYMDDILIAGKDGQQVLQCFDQLKQELTAAGLHIAPEKVQLQDPYTYLGFELNGPKITNQKAVIRKDKLQTLNDFQKLLGDINWLRPYLKLTTGDLKPLFDTLKGDSDPNSHRSLSKEALASLEKVETAIAEQFVTHINYSLPLIFLIFNTALTPTGLFWQDNPIMWIHLPASPKKVLLPYYDAIADLIILGRDHSKKYFGIEPSTIIQPYSKSQIDWLMQNTEMWPIACASFVGILDNHYPPNKLIQFCKLHTFVFPQIISKTPLNNALLVFTDGSSTGMAAYTLTDTTIKFQTNLNSAQLVELQALIAVLSAFPNQPLNIYTDSAYLAHSIPLLETVAQIKHISETAKLFLQCQQLIYNRSIPFYIGHVRAHSGLPGPIAQGNQRADLATKIVASNINT

SEQ ID NO: 8098 - protein, 585 aa, synthetic construct
LTAAIDILAPQQCAEPITWKSDEPVWVDQWPLTNDKLAAAQQLVQEQLEAGHITESSSPWNTPIFVIKKKSGKWRLLQDLRAVNATMVLMGALQPGLPSPVAPPQGYLKIIIDLKDCFFSIPLHPSDQKRFAFSLPSTNFKEPMQRFQWKVLPQGMANSPTLCQKYVATAIHKVRHAWKQMYIIHYMDDILIAGKDGQQVLQCFDQLKQELTAAGLHIAPEKVQLQDPYTYLGFELNGPKITNQKAVIRKDKLQTLNDFQKLLGDINWLRPYLKLTTGDLKPLFDTLKPDSDPNSHRSLSKEALASLEKVETAIAEQFVTHINYSLPLIFLIFNTALTPTGLFWQDNPIMWIHLPASPKKVLLPYYDAIADLIILGRDHSKKYFGIEPSTIIQPYSKSQIDWLMQNTEMWPIACASFVGILDNHYPPNKLIQFCKLHTFVFPQIISKTPLNNALLVFTDGSSTGMAAYTLTDTTIKFQTNLNSAQLVELQALIAVLSAFPNQPLNIYTDSAYLAHSIPLLETVAQIKHISETAKLFLQCQQLIYNRSIPFYIGHVRAHSGLPGPIAQGNQRADLATKIVASNINT

SEQ ID NO: 8099 - protein, 665 aa, unidentified
TLQLDDEYRLYSPLVKPDQNIQFWLEQFPQAWAETAGMGLAKQVPPQVIQLKASATPVSVRQYPLSKEAQEGIRPHVQRLIQQGILVPVQSPWNTPLLPVRKPGTNDYRPVQDLREVNKRVQDIHPTVPNPYNLLCALPPQRSWYTVLDLKDAFFCLRLHPTSQPLFAFEWRDPGTGRTGQLTWTRLPQGFKNSPTIFDEALHRDLANFRIQHPQVTLLQYVDDLLLAGATKQDCLEGTKALLLELSDLGYRASAKKAQICRREVTYLGYSLRDGQRWLTEARKKTVVQIPAPTTAKQVREFLGTAGFCRLWIPGFATLAAPLYPLTKEKGEFSWAPEHQKAFDAIKKALLSAPALALPDVTKPFTLYVDERKGVARGVLTQTLGPWRRPVAYLSKKLDPVASGWPVCLKAIAAVAILVKDADKLTLGQNITVIAPHALENIVRQPPDRWMTNARMTHYQSLLLTERVTFAPPAALNPATLLPEETDEPVTHDCHQLLIEETGVRKDLTDIPLTGEVLTWFTDGSSYVVEGKRMAGAAVVDGTRTIWASSLPEGTSAQKAELMALTQALRLAEGKSINIYTDSRYAFATAHVHGAIYKQRGLLTSAGREIKNKEEILSLLEALHLPKRLAIIHCPGHQKAKDPISRGNQMADRVAKQAAQGVNLL

SEQ ID NO: 8100 - protein, 665 aa, unidentified; identical to SEQ ID NO: 8099

SEQ ID NO: 8101 - protein, 665 aa, synthetic construct
TLQLDDEYRLYSPLVKPDQNIQFWLEQFPQAWAETAGMGLAKQVPPQVIQLKASATPVSVRQYPLSKEAQEGIRPHVQRLIQQGILVPVQSPWNTPLLPVRKPGTNDYRPVQDLREVNKRVQDIHPTVPNPYNLLCALPPQRSWYTVLDLKDAFFCLRLHPTSQPLFAFEWRDPGTGRTGQLTWTRLPQGFKNSPTIFNEALHRDLANFRIQHPQVTLLQYVDDLLLAGATKQDCLEGTKALLLELSDLGYRASAKKAQICRREVTYLGYSLRDGQRWLTEARKKTVVQIPAPTTAKQVREFLGTAGFCRLWIPGFATLAAPLYPLTKPKGEFSWAPEHQKAFDAIKKALLSAPALALPDVTKPFTLYVDERKGVARGVLTQTLGPWRRPVAYLSKKLDPVASGWPVCLKAIAAVAILVKDADKLTLGQNITVIAPHALENIVRQPPDRWMTNARMTHYQSLLLTERVTFAPPAALNPATLLPEETDEPVTHDCHQLLIEETGVRKDLTDIPLTGEVLTWFTDGSSYVVEGKRMAGAAVVDGTRTIWASSLPEGTSAQKAELMALTQALRLAEGKSINIYTDSRYAFATAHVHGAIYKQRGWLTSAGREIKNKEEILSLLEALHLPKRLAIIHCPGHQKAKDPISRGNQMADRVAKQAAQGVNLL

SEQ ID NO: 8102 - protein, 665 aa, synthetic construct; identical to SEQ ID NO: 8101

SEQ ID NO: 8103 - protein, 663 aa, synthetic construct
LDDEYRLYSPLVKPDQNIQFWLEQFPQAWAETAGMGLAKQVPPQVIQLKASATPVSVRQYPLSKEAQEGIRPHVQRLIQQGILVPVQSPWNTPLLPVRKPGTNDYRPVQDLREVNKRVQDIHPTVPNPYNLLCALPPQRSWYTVLDLKDAFFCLRLHPTSQPLFAFEWRDPGTGRTGQLTWTRLPQGFKNSPTIFNEALHRDLANFRIQHPQVTLLQYVDDLLLAGATKQDCLEGTKALLLELSDLGYRASAKKAQICRREVTYLGYSLRDGQRWLTEARKKTVVQIPAPTTAKQVREFLGKAGFCRLFIPGFATLAAPLYPLTKPKGEFSWAPEHQKAFDAIKKALLSAPALALPDVTKPFTLYVDERKGVARGVLTQTLGPWRRPVAYLSKKLDPVASGWPVCLKAIAAVAILVKDADKLTLGQNITVIAPHALENIVRQPPDRWMTNARMTHYQSLLLTERVTFAPPAALNPATLLPEETDEPVTHDCHQLLIEETGVRKDLTDIPLTGEVLTWFTDGSSYVVEGKRMAGAAVVDGTRTIWASSLPEGTSAQKAELMALTQALRLAEGKSINIYTDSRYAFATAHVHGAIYKQRGWLTSAGREIKNKEEILSLLEALHLPKRLAIIHCPGHQKAKDPISRGNQMADRVAKQAAQGVNLLP

SEQ ID NO: 8104 - protein, 663 aa, synthetic construct; identical to SEQ ID NO: 8103

SEQ ID NO: 8105 - protein, 751 aa, synthetic construct
MDPLQLLQPLEAEIKGTKLKAHWNSGATITCVPEAFLEDERPIQTMLIKTIHGEKQQDVYYLTFKVQGRKVEAEVLASPYDYILLNPSDVPWLMKKPLQLTVLVPLHEYQERLLQQTALPKEQKELLQKLFLKYDALWQHWENQVGHRRIKPHNIATGTLAPRPQKQYPINPKAKPSIQIVIDDLLKQGVLIQQNSTMNTPVYPVPKPDGKWRMVLDYREVNKTIPLIAAQNQHSAGILSSIYRGKYKTTLDLTNGFWAHPITPESYWLTAFTWQGKQYCWTRLPQGFLNSPALFTADVVDLLKEIPNVQAYVDDIYISHDDPQEHLEQLEKIFSILLNAGYVVSLKKSEIAQREVEFLGFNITKEGRGLTDTFKQKLLNITPPKDLKQLQSILGLLNFARNFIPNYSELVKPLYTIVANANGKFISWTEDNSNQLQHIISVLNQADNLEERNPETRLIIKVNSSPSAGYIRYYNEGSKRPIMYVNYIFSKAEAKFTQTEKLLTTMHKGLIKAMDLAMGQEILVYSPIVSMTKIQRTPLPERKALPVRWITWMTYLEDPRIQFHYDKSLPELQQIPNVTEDVIAKTKHPSEFAMVFYTDGSAIKHPDVNKSHSAGMGIAQVQFIPEYKIVHQWSIPLGDHTAQLAEIAAVEFACKKALKISGPVLIVTDSFYVAESANKELPYWKSNGFLNNKKKPLRHVSKWKSIAECLQLKPDIIIMHEKGHQQPMTTLHTEGNNLADKLATQGSYVVH

SEQ ID NO: 8106 - protein, 751 aa, synthetic construct
MDPLQLLQPLEAEIKGTKLKAHWNSGATITCVPEAFLEDERPIQTMLIKTIHGEKQQDVYYLTFKVQGRKVEAEVLASPYDYILLNPSDVPWLMKKPLQLTVLVPLHEYQERLLQQTALPKEQKELLQKLFLKYDALWQHWENQVGHRRIKPHNIATGTLAPRPQKQYPINPKAKPSIQIVIDDLLKQGVLIQQNSTMNTPVYPVPKPDGKWRMVLDYREVNKTIPLIAAQNQHSAGILSSIYRGKYKTTLDLTNGFWAHPITPESYWLTAFTWQGKQYCWTRLPQGFLNSPALFNADVVDLLKEIPNVQAYVDDIYISHDDPQEHLEQLEKIFSILLNAGYVVSLKKSEIAQREVEFLGFNITKEGRGLTDTFKQKLLNITPPKDLKQLQSILGLLNFARNFIPNYSELVKPLYTIVAPANGKFISWTEDNSNQLQHIISVLNQADNLEERNPETRLIIKVNSSPSAGYIRYYNEGSKRPIMYVNYIFSKAEAKFTQTEKLLTTMHKGLIKAMDLAMGQEILVYSPIVSMTKIQRTPLPERKALPVRWITWMTYLEDPRIQFHYDKSLPELQQIPNVTEDVIAKTKHPSEFAMVFYTDGSAIKHPDVNKSHSAGMGIAQVQFIPEYKIVHQWSIPLGDHTAQLAEIAAVEFACKKALKISGPVLIVTDSFYVAESANKELPYWKSNGFLNNKKKPLRHVSKWKSIAECLQLKPDIIIMHEKGHQQPMTTLHTEGNNLADKLATQGSYVVH

SEQ ID NO: 8107 - protein, 751 aa, synthetic construct
MDPLQLLQPLEAEIKGTKLKAHWNSGATITCVPEAFLEDERPIQTMLIKTIHGEKQQDVYYLTFKVQGRKVEAEVLASPYDYILLNPSDVPWLMKKPLQLTVLVPLHEYQERLLQQTALPKEQKELLQKLFLKYDALWQHWENQVGHRRIKPHNIATGTLAPRPQKQYPINPKAKPSIQIVIDDLLKQGVLIQQNSTMNTPVYPVPKPDGKWRMVLDYREVNKTIPLIAAQNQHSAGILSSIYRGKYKTTLDLTNGFWAHPITPESYWLTAFTWQGKQYCWTRLPQGFLNSPALFNADVVDLLKEIPNVQAYVDDIYISHDDPQEHLEQLEKIFSILLNAGYVVSLKKSEIAQREVEFLGFNITKEGRGLTDTFKQKLLNITPPKDLKQLQSILGKLNFARNFIPNYSELVKPLYTIVAPANGKFISWTEDNSNQLQHIISVLNQADNLEERNPETRLIIKVNSSPSAGYIRYYNEGSKRPIMYVNYIFSKAEAKFTQTEKLLTTMHKGLIKAMDLAMGQEILVYSPIVSMTKIQRTPLPERKALPVRWITWMTYLEDPRIQFHYDKSLPELQQIPNVTEDVIAKTKHPSEFAMVFYTDGSAIKHPDVNKSHSAGMGIAQVQFIPEYKIVHQWSIPLGDHTAQLAEIAAVEFACKKALKISGPVLIVTDSFYVAESANKELPYWKSNGFLNNKKKPLRHVSKWKSIAECLQLKPDIIIMHEKGHQQPMTTLHTEGNNLADKLATQGSYVVH

SEQ ID NO: 8108 - protein, 662 aa, synthetic construct
VPWLMKKPLQLTVLVPLHEYQERLLQQTALPKEQKELLQKLFLKYDALWQHWENQVGHRRIKPHNIATGTLAPRPQKQYPINPKAKPSIQIVIDDLLKQGVLIQQNSTMNTPVYPVPKPDGKWRMVLDYREVNKTIPLIAAQNQHSAGILSSIYRGKYKTTLDLTNGFWAHPITPESYWLTAFTWQGKQYCWTRLPQGFLNSPALFTADVVDLLKEIPNVQAYVDDIYISHDDPQEHLEQLEKIFSILLNAGYVVSLKKSEIAQREVEFLGFNITKEGRGLTDTFKQKLLNITPPKDLKQLQSILGLLNFARNFIPNYSELVKPLYTIVANANGKFISWTEDNSNQLQHIISVLNQADNLEERNPETRLIIKVNSSPSAGYIRYYNEGSKRPIMYVNYIFSKAEAKFTQTEKLLTTMHKGLIKAMDLAMGQEILVYSPIVSMTKIQRTPLPERKALPVRWITWMTYLEDPRIQFHYDKSLPELQQIPNVTEDVIAKTKHPSEFAMVFYTDGSAIKHPDVNKSHSAGMGIAQVQFIPEYKIVHQWSIPLGDHTAQLAEIAAVEFACKKALKISGPVLIVTDSFYVAESANKELPYWKSNGFLNNKKKPLRHVSKWKSIAECLQLKPDIIIMHEKGHQQPMTTLHTEGNNLADKLATQGSYVVH

SEQ ID NO: 8109 - protein, 662 aa, synthetic construct
VPWLMKKPLQLTVLVPLHEYQERLLQQTALPKEQKELLQKLFLKYDALWQHWENQVGHRRIKPHNIATGTLAPRPQKQYPINPKAKPSIQIVIDDLLKQGVLIQQNSTMNTPVYPVPKPDGKWRMVLDYREVNKTIPLIAAQNQHSAGILSSIYRGKYKTTLDLTNGFWAHPITPESYWLTAFTWQGKQYCWTRLPQGFLNSPALFNADVVDLLKEIPNVQAYVDDIYISHDDPQEHLEQLEKIFSILLNAGYVVSLKKSEIAQREVEFLGFNITKEGRGLTDTFKQKLLNITPPKDLKQLQSILGLLNFARNFIPNYSELVKPLYTIVAPANGKFISWTEDNSNQLQHIISVLNQADNLEERNPETRLIIKVNSSPSAGYIRYYNEGSKRPIMYVNYIFSKAEAKFTQTEKLLTTMHKGLIKAMDLAMGQEILVYSPIVSMTKIQRTPLPERKALPVRWITWMTYLEDPRIQFHYDKSLPELQQIPNVTEDVIAKTKHPSEFAMVFYTDGSAIKHPDVNKSHSAGMGIAQVQFIPEYKIVHQWSIPLGDHTAQLAEIAAVEFACKKALKISGPVLIVTDSFYVAESANKELPYWKSNGFLNNKKKPLRHVSKWKSIAECLQLKPDIIIMHEKGHQQPMTTLHTEGNNLADKLATQGSYVVH

SEQ ID NO: 8110 - protein, 662 aa, synthetic construct
VPWLMKKPLQLTVLVPLHEYQERLLQQTALPKEQKELLQKLFLKYDALWQHWENQVGHRRIKPHNIATGTLAPRPQKQYPINPKAKPSIQIVIDDLLKQGVLIQQNSTMNTPVYPVPKPDGKWRMVLDYREVNKTIPLIAAQNQHSAGILSSIYRGKYKTTLDLTNGFWAHPITPESYWLTAFTWQGKQYCWTRLPQGFLNSPALFNADVVDLLKEIPNVQAYVDDIYISHDDPQEHLEQLEKIFSILLNAGYVVSLKKSEIAQREVEFLGFNITKEGRGLTDTFKQKLLNITPPKDLKQLQSILGKLNFARNFIPNYSELVKPLYTIVAPANGKFISWTEDNSNQLQHIISVLNQADNLEERNPETRLIIKVNSSPSAGYIRYYNEGSKRPIMYVNYIFSKAEAKFTQTEKLLTTMHKGLIKAMDLAMGQEILVYSPIVSMTKIQRTPLPERKALPVRWITWMTYLEDPRIQFHYDKSLPELQQIPNVTEDVIAKTKHPSEFAMVFYTDGSAIKHPDVNKSHSAGMGIAQVQFIPEYKIVHQWSIPLGDHTAQLAEIAAVEFACKKALKISGPVLIVTDSFYVAESANKELPYWKSNGFLNNKKKPLRHVSKWKSIAECLQLKPDIIIMHEKGHQQPMTTLHTEGNNLADKLATQGSYVVH

SEQ ID NO: 8111 - protein, 751 aa, unidentified
MDPLQLLQPLEAEIKGTKLKAHWNSGATITCVPQAFLEEEVPIKNIWIKTIHGEKEQPVYYLTFKIQGRKVEAEVISSPYDYILVSPSDIPWLMKKPLQLTTLVPLQEYEERLLKQTMLTGSYKEKLQSLFLKYDALWQHWENQVGHRRIKPHHIATGTVNPRPQKQYPINPKAKASIQTVINDLLKQGVLIQQNSIMNTPVYPVPKPDGKWRMVLDYREVNKTIPLIAAQNQHSAGILSSIFRGKYKTTLDLSNGFWAHSITPESYWLTAFTWLGQQYCWTRLPQGFLNSPALFTADVVDLLKEVPNVQVYVDDIYISHDDPREHLEQLEKVFSLLLNAGYVVSLKKSEIAQHEVEFLGFNITKEGRGLTETFKQKLLNITPPRDLKQLQSILGLLNFARNFIPNFSELVKPLYNIIATANGKYITWTTDNSQQLQNIISMLNSAENLEERNPEVRLIMKVNTSPSAGYIRFYNEFAKRPIMYLNYVYTKAEVKFTNTEKLLTTIHKGLIKALDLGMGQEILVYSPIVSMTKIQKTPLPERKALPIRWITWMSYLEDPRIQFHYDKTLPELQQVPTVTDDIIAKIKHPSEFSMVFYTDGSAIKHPNVNKSHNAGMGIAQVQFKPEFTVINTWSIPLGDHTAQLAEVAAVEFACKKALKIDGPVLIVTDSFYVAESVNKELPYWQSNGFFNNKKKPLKHVSKWKSIADCIQLKPDIIIIHEKGHQPTASTFHTEGNNLADKLATQGSYVVN

SEQ ID NO: 8112 - protein, 751 aa, synthetic construct
MDPLQLLQPLEAEIKGTKLKAHWNSGATITCVPQAFLEEEVPIKNIWIKTIHGEKEQPVYYLTFKIQGRKVEAEVISSPYDYILVSPSDIPWLMKKPLQLTTLVPLQEYEERLLKQTMLTGSYKEKLQSLFLKYDALWQHWENQVGHRRIKPHHIATGTVNPRPQKQYPINPKAKASIQTVINDLLKQGVLIQQNSIMNTPVYPVPKPDGKWRMVLDYREVNKTIPLIAAQNQHSAGILSSIFRGKYKTTLDLSNGFWAHSITPESYWLTAFTWLGQQYCWTRLPQGFLNSPALFNADVVDLLKEVPNVQVYVDDIYISHDDPREHLEQLEKVFSLLLNAGYVVSLKKSEIAQHEVEFLGFNITKEGRGLTETFKQKLLNITPPRDLKQLQSILGLLNFARNFIPNFSELVKPLYNIIATAPGKYITWTTDNSQQLQNIISMLNSAENLEERNPEVRLIMKVNTSPSAGYIRFYNEFAKRPIMYLNYVYTKAEVKFTNTEKLLTTIHKGLIKALDLGMGQEILVYSPIVSMTKIQKTPLPERKALPIRWITWMSYLEDPRIQFHYDKTLPELQQVPTVTDDIIAKIKHPSEFSMVFYTDGSAIKHPNVNKSHNAGMGIAQVQFKPEFTVINTWSIPLGDHTAQLAEVAAVEFACKKALKIDGPVLIVTDSFYVAESVNKELPYWQSNGFFNNKKKPLKHVSKWKSIADCIQLKPDIIIIHEKGHQPTASTFHTEGNNLADKLATQGSYVVN

SEQ ID NO: 8113 - protein, 751 aa, synthetic construct
MDPLQLLQPLEAEIKGTKLKAHWNSGATITCVPQAFLEEEVPIKNIWIKTIHGEKEQPVYYLTFKIQGRKVEAEVISSPYDYILVSPSDIPWLMKKPLQLTTLVPLQEYEERLLKQTMLTGSYKEKLQSLFLKYDALWQHWENQVGHRRIKPHHIATGTVNPRPQKQYPINPKAKASIQTVINDLLKQGVLIQQNSIMNTPVYPVPKPDGKWRMVLDYREVNKTIPLIAAQNQHSAGILSSIFRGKYKTTLDLSNGFWAHSITPESYWLTAFTWLGQQYCWTRLPQGFLNSPALFNADVVDLLKEVPNVQVYVDDIYISHDDPREHLEQLEKVFSLLLNAGYVVSLKKSEIAQHEVEFLGFNITKEGRGLTETFKQKLLNITPPRDLKQLQSILGKLNFARNFIPNFSELVKPLYNIIATAPGKYITWTTDNSQQLQNIISMLNSAENLEERNPEVRLIMKVNTSPSAGYIRFYNEFAKRPIMYLNYVYTKAEVKFTNTEKLLTTIHKGLIKALDLGMGQEILVYSPIVSMTKIQKTPLPERKALPIRWITWMSYLEDPRIQFHYDKTLPELQQVPTVTDDIIAKIKHPSEFSMVFYTDGSAIKHPNVNKSHNAGMGIAQVQFKPEFTVINTWSIPLGDHTAQLAEVAAVEFACKKALKIDGPVLIVTDSFYVAESVNKELPYWQSNGFFNNKKKPLKHVSKWKSIADCIQLKPDIIIIHEKGHQPTASTFHTEGNNLADKLATQGSYVVN

SEQ ID NO: 8114 - protein, 662 aa, unidentified
IPWLMKKPLQLTTLVPLQEYEERLLKQTMLTGSYKEKLQSLFLKYDALWQHWENQVGHRRIKPHHIATGTVNPRPQKQYPINPKAKASIQTVINDLLKQGVLIQQNSIMNTPVYPVPKPDGKWRMVLDYREVNKTIPLIAAQNQHSAGILSSIFRGKYKTTLDLSNGFWAHSITPESYWLTAFTWLGQQYCWTRLPQGFLNSPALFTADVVDLLKEVPNVQVYVDDIYISHDDPREHLEQLEKVFSLLLNAGYVVSLKKSEIAQHEVEFLGFNITKEGRGLTETFKQKLLNITPPRDLKQLQSILGLLNFARNFIPNFSELVKPLYNIIATANGKYITWTTDNSQQLQNIISMLNSAENLEERNPEVRLIMKVNTSPSAGYIRFYNEFAKRPIMYLNYVYTKAEVKFTNTEKLLTTIHKGLIKALDLGMGQEILVYSPIVSMTKIQKTPLPERKALPIRWITWMSYLEDPRIQFHYDKTLPELQQVPTVTDDIIAKIKHPSEFSMVFYTDGSAIKHPNVNKSHNAGMGIAQVQFKPEFTVINTWSIPLGDHTAQLAEVAAVEFACKKALKIDGPVLIVTDSFYVAESVNKELPYWQSNGFFNNKKKPLKHVSKWKSIADCIQLKPDIIIIHEKGHQPTASTFHTEGNNLADKLATQGSYVVN

SEQ ID NO: 8115 - protein, 662 aa, synthetic construct
IPWLMKKPLQLTTLVPLQEYEERLLKQTMLTGSYKEKLQSLFLKYDALWQHWENQVGHRRIKPHHIATGTVNPRPQKQYPINPKAKASIQTVINDLLKQGVLIQQNSIMNTPVYPVPKPDGKWRMVLDYREVNKTIPLIAAQNQHSAGILSSIFRGKYKTTLDLSNGFWAHSITPESYWLTAFTWLGQQYCWTRLPQGFLNSPALFNADVVDLLKEVPNVQVYVDDIYISHDDPREHLEQLEKVFSLLLNAGYVVSLKKSEIAQHEVEFLGFNITKEGRGLTETFKQKLLNITPPRDLKQLQSILGLLNFARNFIPNFSELVKPLYNIIATAPGKYITWTTDNSQQLQNIISMLNSAENLEERNPEVRLIMKVNTSPSAGYIRFYNEFAKRPIMYLNYVYTKAEVKFTNTEKLLTTIHKGLIKALDLGMGQEILVYSPIVSMTKIQKTPLPERKALPIRWITWMSYLEDPRIQFHYDKTLPELQQVPTVTDDIIAKIKHPSEFSMVFYTDGSAIKHPNVNKSHNAGMGIAQVQFKPEFTVINTWSIPLGDHTAQLAEVAAVEFACKKALKIDGPVLIVTDSFYVAESVNKELPYWQSNGFFNNKKKPLKHVSKWKSIADCIQLKPDIIIIHEKGHQPTASTFHTEGNNLADKLATQGSYVVN

SEQ ID NO: 8116 - protein, 662 aa, synthetic construct
IPWLMKKPLQLTTLVPLQEYEERLLKQTMLTGSYKEKLQSLFLKYDALWQHWENQVGHRRIKPHHIATGTVNPRPQKQYPINPKAKASIQTVINDLLKQGVLIQQNSIMNTPVYPVPKPDGKWRMVLDYREVNKTIPLIAAQNQHSAGILSSIFRGKYKTTLDLSNGFWAHSITPESYWLTAFTWLGQQYCWTRLPQGFLNSPALFNADVVDLLKEVPNVQVYVDDIYISHDDPREHLEQLEKVFSLLLNAGYVVSLKKSEIAQHEVEFLGFNITKEGRGLTETFKQKLLNITPPRDLKQLQSILGKLNFARNFIPNFSELVKPLYNIIATAPGKYITWTTDNSQQLQNIISMLNSAENLEERNPEVRLIMKVNTSPSAGYIRFYNEFAKRPIMYLNYVYTKAEVKFTNTEKLLTTIHKGLIKALDLGMGQEILVYSPIVSMTKIQKTPLPERKALPIRWITWMSYLEDPRIQFHYDKTLPELQQVPTVTDDIIAKIKHPSEFSMVFYTDGSAIKHPNVNKSHNAGMGIAQVQFKPEFTVINTWSIPLGDHTAQLAEVAAVEFACKKALKIDGPVLIVTDSFYVAESVNKELPYWQSNGFFNNKKKPLKHVSKWKSIADCIQLKPDIIIIHEKGHQPTASTFHTEGNNLADKLATQGSYVVN

SEQ ID NO: 8117 - protein, 751 aa, synthetic construct
MNPLQLLQPLPAEVKGTKLLAHWNSGATITCIPESFLEDEQPIKQTLIKTIHGEKQQNVYYLTFKVKGRKVEAEVIASPYEYILLSPTDVPWLTQQPLQLTILVPLQEYQDRILNKTALPEEQKQQLKALFTKYDNLWQHWENQVGHRKIRPHNIATGDYPPRPQKQYPINPKAKPSIQIVIDDLLKQGVLTPQNSTMNTPVYPVPKPDGRWRMVLDYREVNKTIPLTAAQNQHSAGILATIVRQKYKTTLDLANGFWAHPITPDSYWLTAFTWQGKQYCWTRLPQGFLNSPALFTADAVDLLKEVPNVQVYVDDIYLSHDNPHEHIQQLEKVFQILLQAGYVVSLKKSEIGQRTVEFLGFNITKEGRGLTDTFKTKLLNVTPPKDLKQLQSILGLLNFARNFIPNFAELVQTLYNLIASSKGKYIEWTEDNTKQLNKVIEALNTASNLEERLPDQRLVIKVNTSPSAGYVRYYNESGKKPIMYLNYVFSKAELKFSMLEKLLTTMHKALIKAMDLAMGQEILVYSPIVSMTKIQKTPLPERKALPIRWITWMTYLEDPRIQFHYDKTLPELKHIPDVYTSSIPPLKHPSQYEGVFCTDGSAIKSPDPTKSNNAGMGIVHAIYNPEYKILNQWSIPLGHHTAQMAEIAAVEFACKKALKVPGPVLVITDSFYVAESANKELPYWKSNGFVNNKKEPLKHISKWKSIAECLSIKPDITIQHEKGHQPINTSIHTEGNALADKLATQGSYVVN

SEQ ID NO: 8118 - protein, 751 aa, synthetic construct
MNPLQLLQPLPAEVKGTKLLAHWNSGATITCIPESFLEDEQPIKQTLIKTIHGEKQQNVYYLTFKVKGRKVEAEVIASPYEYILLSPTDVPWLTQQPLQLTILVPLQEYQDRILNKTALPEEQKQQLKALFTKYDNLWQHWENQVGHRKIRPHNIATGDYPPRPQKQYPINPKAKPSIQIVIDDLLKQGVLTPQNSTMNTPVYPVPKPDGRWRMVLDYREVNKTIPLTAAQNQHSAGILATIVRQKYKTTLDLANGFWAHPITPDSYWLTAFTWQGKQYCWTRLPQGFLNSPALFNADAVDLLKEVPNVQVYVDDIYLSHDNPHEHIQQLEKVFQILLQAGYVVSLKKSEIGQRTVEFLGFNITKEGRGLTDTFKTKLLNVTPPKDLKQLQSILGLLNFARNFIPNFAELVQTLYNLIASSPGKYIEWTEDNTKQLNKVIEALNTASNLEERLPDQRLVIKVNTSPSAGYVRYYNESGKKPIMYLNYVFSKAELKFSMLEKLLTTMHKALIKAMDLAMGQEILVYSPIVSMTKIQKTPLPERKALPIRWITWMTYLEDPRIQFHYDKTLPELKHIPDVYTSSIPPLKHPSQYEGVFCTDGSAIKSPDPTKSNNAGMGIVHAIYNPEYKILNQWSIPLGHHTAQMAEIAAVEFACKKALKVPGPVLVITDSFYVAESANKELPYWKSNGFVNNKKEPLKHISKWKSIAECLSIKPDITIQHEKGHQPINTSIHTEGNALADKLATQGSYVVN

SEQ ID NO: 8119 - protein, 751 aa, synthetic construct
MNPLQLLQPLPAEVKGTKLLAHWNSGATITCIPESFLEDEQPIKQTLIKTIHGEKQQNVYYLTFKVKGRKVEAEVIASPYEYILLSPTDVPWLTQQPLQLTILVPLQEYQDRILNKTALPEEQKQQLKALFTKYDNLWQHWENQVGHRKIRPHNIATGDYPPRPQKQYPINPKAKPSIQIVIDDLLKQGVLTPQNSTMNTPVYPVPKPDGRWRMVLDYREVNKTIPLTAAQNQHSAGILATIVRQKYKTTLDLANGFWAHPITPDSYWLTAFTWQGKQYCWTRLPQGFLNSPALFNADAVDLLKEVPNVQVYVDDIYLSHDNPHEHIQQLEKVFQILLQAGYVVSLKKSEIGQRTVEFLGFNITKEGRGLTDTFKTKLLNVTPPKDLKQLQSILGKLNFARNFIPNFAELVQTLYNLIASSPGKYIEWTEDNTKQLNKVIEALNTASNLEERLPDQRLVIKVNTSPSAGYVRYYNESGKKPIMYLNYVFSKAELKFSMLEKLLTTMHKALIKAMDLAMGQEILVYSPIVSMTKIQKTPLPERKALPIRWITWMTYLEDPRIQFHYDKTLPELKHIPDVYTSSIPPLKHPSQYEGVFCTDGSAIKSPDPTKSNNAGMGIVHAIYNPEYKILNQWSIPLGHHTAQMAEIAAVEFACKKALKVPGPVLVITDSFYVAESANKELPYWKSNGFVNNKKEPLKHISKWKSIAECLSIKPDITIQHEKGHQPINTSIHTEGNALADKLATQGSYVVN

SEQ ID NO: 8120 - protein, 662 aa, synthetic construct
VPWLTQQPLQLTILVPLQEYQDRILNKTALPEEQKQQLKALFTKYDNLWQHWENQVGHRKIRPHNIATGDYPPRPQKQYPINPKAKPSIQIVIDDLLKQGVLTPQNSTMNTPVYPVPKPDGRWRMVLDYREVNKTIPLTAAQNQHSAGILATIVRQKYKTTLDLANGFWAHPITPDSYWLTAFTWQGKQYCWTRLPQGFLNSPALFTADAVDLLKEVPNVQVYVDDIYLSHDNPHEHIQQLEKVFQILLQAGYVVSLKKSEIGQRTVEFLGFNITKEGRGLTDTFKTKLLNVTPPKDLKQLQSILGLLNFARNFIPNFAELVQTLYNLIASSKGKYIEWTEDNTKQLNKVIEALNTASNLEERLPDQRLVIKVNTSPSAGYVRYYNESGKKPIMYLNYVFSKAELKFSMLEKLLTTMHKALIKAMDLAMGQEILVYSPIVSMTKIQKTPLPERKALPIRWITWMTYLEDPRIQFHYDKTLPELKHIPDVYTSSIPPLKHPSQYEGVFCTDGSAIKSPDPTKSNNAGMGIVHAIYNPEYKILNQWSIPLGHHTAQMAEIAAVEFACKKALKVPGPVLVITDSFYVAESANKELPYWKSNGFVNNKKEPLKHISKWKSIAECLSIKPDITIQHEKGHQPINTSIHTEGNALADKLATQGSYVVN

SEQ ID NO: 8121 - protein, 662 aa, synthetic construct
VPWLTQQPLQLTILVPLQEYQDRILNKTALPEEQKQQLKALFTKYDNLWQHWENQVGHRKIRPHNIATGDYPPRPQKQYPINPKAKPSIQIVIDDLLKQGVLTPQNSTMNTPVYPVPKPDGRWRMVLDYREVNKTIPLTAAQNQHSAGILATIVRQKYKTTLDLANGFWAHPITPDSYWLTAFTWQGKQYCWTRLPQGFLNSPALFNADAVDLLKEVPNVQVYVDDIYLSHDNPHEHIQQLEKVFQILLQAGYVVSLKKSEIGQRTVEFLGFNITKEGRGLTDTFKTKLLNVTPPKDLKQLQSILGLLNFARNFIPNFAELVQTLYNLIASSPGKYIEWTEDNTKQLNKVIEALNTASNLEERLPDQRLVIKVNTSPSAGYVRYYNESGKKPIMYLNYVFSKAELKFSMLEKLLTTMHKALIKAMDLAMGQEILVYSPIVSMTKIQKTPLPERKALPIRWITWMTYLEDPRIQFHYDKTLPELKHIPDVYTSSIPPLKHPSQYEGVFCTDGSAIKSPDPTKSNNAGMGIVHAIYNPEYKILNQWSIPLGHHTAQMAEIAAVEFACKKALKVPGPVLVITDSFYVAESANKELPYWKSNGFVNNKKEPLKHISKWKSIAECLSIKPDITIQHEKGHQPINTSIHTEGNALADKLATQGSYVVN

SEQ ID NO: 8122 - protein, 662 aa, synthetic construct
VPWLTQQPLQLTILVPLQEYQDRILNKTALPEEQKQQLKALFTKYDNLWQHWENQVGHRKIRPHNIATGDYPPRPQKQYPINPKAKPSIQIVIDDLLKQGVLTPQNSTMNTPVYPVPKPDGRWRMVLDYREVNKTIPLTAAQNQHSAGILATIVRQKYKTTLDLANGFWAHPITPDSYWLTAFTWQGKQYCWTRLPQGFLNSPALFNADAVDLLKEVPNVQVYVDDIYLSHDNPHEHIQQLEKVFQILLQAGYVVSLKKSEIGQRTVEFLGFNITKEGRGLTDTFKTKLLNVTPPKDLKQLQSILGKLNFARNFIPNFAELVQTLYNLIASSPGKYIEWTEDNTKQLNKVIEALNTASNLEERLPDQRLVIKVNTSPSAGYVRYYNESGKKPIMYLNYVFSKAELKFSMLEKLLTTMHKALIKAMDLAMGQEILVYSPIVSMTKIQKTPLPERKALPIRWITWMTYLEDPRIQFHYDKTLPELKHIPDVYTSSIPPLKHPSQYEGVFCTDGSAIKSPDPTKSNNAGMGIVHAIYNPEYKILNQWSIPLGHHTAQMAEIAAVEFACKKALKVPGPVLVITDSFYVAESANKELPYWKSNGFVNNKKEPLKHISKWKSIAECLSIKPDITIQHEKGHQPINTSIHTEGNALADKLATQGSYVVN

SEQ ID NO: 8123 - protein, 592 aa, Squirrel monkey retrovirus
PRSRAIDIPVPHADKISWKITDPVWVDQWPLTYEKTLAAIALVQEQLAAGHIEPTNSPWNTPIFIIKKKSGSWRLLQDLRAVNKVMVPMGALQPGLPSPVAIPLNYHKIVIDLKDCFFTIPLHPEDRPYFAFSVPQINFQSPMPRYQWKVLPQGMANSPTLCQKFVAAAIAPVRSQWPEAYILHYMDDILLACDSAEAAKACYAHIISCLTSYGLKIAPDKVQVSEPFSYLGFELHHQQVFTPRVCLKTDHLKTLNDFQKLLGDIQWLRPYLKLPTSALVPLNNILKGDPNPLSVRALTPEAKQSLALINKAIQNQSVQQISYNLPLVLLLLPTPHTPTAVFWQPNGTDPTKNGSPLLWLHLPASPSKVLLTYPSLLAMLIIKGRYTGRQLFGRDPHSIIIPYTQDQLTWLLQTSDEWAIALSSFTGDIDNHYPSDPVIQFAKLHQFIFPKITKCAPIPQATLVFTDGSSNGIAAYVIDNQPISIKSPYLSAQLVELYAILQVFTVLAHQPFNLYTDSAYIAQSVPLLETVPFIKSSTNATPLFSKLQQLILNRQHPFFIGHLRAHLNLPGPLAEGNALADAATQIFPIISD

SEQ ID NO: 8124 - protein, 592 aa, synthetic construct
PRSRAIDIPVPHADKISWKITDPVWVDQWPLTYEKTLAAIALVQEQLAAGHIEPTNSPWNTPIFIIKKKSGSWRLLQDLRAVNKVMVPMGALQPGLPSPVAIPLNYHKIVIDLKDCFFTIPLHPEDRPYFAFSVPQINFQSPMPRYQWKVLPQGMANSPTLCQKFVAAAIAPVRSQWPEAYILHYMDDILLACDSAEAAKACYAHIISCLTSYGLKIAPDKVQVSEPFSYLGFELHHQQVFTPRVCLKTDHLKTLNDFQKLLGDIQWLRPYLKLPTSALVPLNNILKPDPNPLSVRALTPEAKQSLALINKAIQNQSVQQISYNLPLVLLLLPTPHTPTAVFWQPNGTDPTKNGSPLLWLHLPASPSKVLLTYPSLLAMLIIKGRYTGRQLFGRDPHSIIIPYTQDQLTWLLQTSDEWAIALSSFTGDIDNHYPSDPVIQFAKLHQFIFPKITKCAPIPQATLVFTDGSSNGIAAYVIDNQPISIKSPYLSAQLVELYAILQVFTVLAHQPFNLYTDSAYIAQSVPLLETVPFIKSSTNATPLFSKLQQLILNRQHPFFIGHLRAHLNLPGPLAEGNALADAATQIFPIISD

SEQ ID NO: 8125 - protein, 592 aa, synthetic construct
PRSRAIDIPVPHADKISWKITDPVWVDQWPLTYEKTLAAIALVQEQLAAGHIEPTNSPWNTPIFIIKKKSGSWRLLQDLRAVNKVMVPMGALQPGLPSPVAPPLNYHKIVIDLKDCFFTIPLHPEDRPYFAFSVPQINFQSPMPRYQWKVLPQGMANSPTLCQKFVAAAIAPVRSQWPEAYILHYMDDILLACDSAEAAKACYAHIISCLTSYGLKIAPDKVQVSEPFSYLGFELHHQQVFTPRVCLKTDHLKTLNDFQKLLGDIQWLRPYLKLPTSALVPLNNILKPDPNPLSVRALTPEAKQSLALINKAIQNQSVQQISYNLPLVLLLLPTPHTPTAVFWQPNGTDPTKNGSPLLWLHLPASPSKVLLTYPSLLAMLIIKGRYTGRQLFGRDPHSIIIPYTQDQLTWLLQTSDEWAIALSSFTGDIDNHYPSDPVIQFAKLHQFIFPKITKCAPIPQATLVFTDGSSNGIAAYVIDNQPISIKSPYLSAQLVELYAILQVFTVLAHQPFNLYTDSAYIAQSVPLLETVPFIKSSTNATPLFSKLQQLILNRQHPFFIGHLRAHLNLPGPLAEGNALADAATQIFPIISD

SEQ ID NO: 8126 - protein, 585 aa, unidentified
LATAVDILAPQRYADPITWKSDEPVWVDQWPLTQEKLAAAQQLVQEQLQAGHIIESNSPWNTPIFVIKKKSGKWRLLQDLRAVNATMVLMGALQPGLPSPVAIPQGYFKIVIDLKDCFFTIPLQPVDQKRFAFSLPSTNFKQPMKRYQWKVLPQGMANSPTLCQKYVAAAIEPVRKSWAQMYIIHYMDDILIAGKLGEQVLQCFAQLKQALTTTGLQIAPEKVQLQDPYTYLGFQINGPKITNQKAVIRRDKLQTLNDFQKLLGDINWLRPYLHLTTGDLKPLFDILKGDSNPNSPRSLSEAALASLQKVETAIAEQFVTQIDYTQPLTFLIFNTTLTPTGLFWQNNPVMWVHLPASPKKVLLPYYDAIADLIILGRDNSKKYFGLEPSTIIQPYSKSQIHWLMQNTETWPIACASYAGNIDNHYPPNKLIQFCKLHAVVFPRIISKTPLDNALLVFTDGSSTGIAAYTFEKTTVRFKTSHTSAQLVELQALIAVLSAFPHRALNVYTDSAYLAHSIPLLETVSHIKHISDTAKFFLQCQQLIYNRSIPFYLGHIRAHSGLPGPLSQGNHITDLATKVVATTLTT

SEQ ID NO: 8127 - protein, 585 aa, synthetic construct
LATAVDILAPQRYADPITWKSDEPVWVDQWPLTQEKLAAAQQLVQEQLQAGHIIESNSPWNTPIFVIKKKSGKWRLLQDLRAVNATMVLMGALQPGLPSPVAPPQGYFKIVIDLKDCFFTIPLQPVDQKRFAFSLPSTNFKQPMKRYQWKVLPQGMANSPTLCQKYVAAAIEPVRKSWAQMYIIHYMDDILIAGKLGEQVLQCFAQLKQALTTTGLQIAPEKVQLQDPYTYLGFQINGPKITNQKAVIRRDKLQTLNDFQKLLGDINWLRPYLHLTTGDLKPLFDILKGDSNPNSPRSLSEAALASLQKVETAIAEQFVTQIDYTQPLTFLIFNTTLTPTGLFWQNNPVMWVHLPASPKKVLLPYYDAIADLIILGRDNSKKYFGLEPSTIIQPYSKSQIHWLMQNTETWPIACASYAGNIDNHYPPNKLIQFCKLHAVVFPRIISKTPLDNALLVFTDGSSTGIAAYTFEKTTVRFKTSHTSAQLVELQALIAVLSAFPHRALNVYTDSAYLAHSIPLLETVSHIKHISDTAKFFLQCQQLIYNRSIPFYLGHIRAHSGLPGPLSQGNHITDLATKVVATTLTT

SEQ ID NO: 8128 - protein, 650 aa, Walleye dermal sarcoma virus
SCQTKNTLNIDEYLLQFPDQLWASLPTDIGRMLVPPITIKIKDNASLPSIRQYPLPKDKTEGLRPLISSLENQGILIKCHSPCNTPIFPIKKAGRDEYRMIHDLRAINNIVAPLTAVVASPTTVLSNLAPSLHWFTVIDLSNAFFSVPIHKDSQYLFAFTFEGHQYTWTVLPQGFIHSPTLFSQALYQSLHKIKFKISSEICIYMDDVLIASKDRDTNLKDTAVMLQHLASEGHKVSKKKLQLCQQEVVYLGQLLTPEGRKILPDRKVTVSQFQQPTTIRQIRAFLGLVGYCRHWIPEFSIHSKFLEKQLKKDTAEPFQLDDQQVEAFNKLKHAITTAPVLVVPDPAKPFQLYTSHSEHASIAVLTQKHAGRTRPIAFLSSKFDAIESGLPPCLKACASIHRSLTQADSFILGAPLIIYTTHAICTLLQRDRSQLVTASRFSKWEADLLRPELTFVACSAVSPAHLYMQSCENNIPPHDCVLLTHTISRPRPDLSDLPIPDPDMTLFSDGSYTTGRGGAAVVMHRPVTDDFIIIHQQPGGASAQTAELLALAAACHLATDKTVNIYTDSRYAYGVVHDFGHLWMHRGFVTSAGTPIKNHKEIEYLLKQIMKPKQVSVIKIEAHTKGVSMEVRGNAAADEAAKNAVFLVQR

SEQ ID NO: 8129 - protein, 650 aa, synthetic construct
SCQTKNTLNIDEYLLQFPDQLWASLPTDIGRMLVPPITIKIKDNASLPSIRQYPLPKDKTEGLRPLISSLENQGILIKCHSPCNTPIFPIKKAGRDEYRMIHDLRAINNIVAPLTAVVASPTTVLSNLAPSLHWFTVIDLSNAFFSVPIHKDSQYLFAFTFEGHQYTWTVLPQGFIHSPTLFNQALYQSLHKIKFKISSEICIYMDDVLIASKDRDTNLKDTAVMLQHLASEGHKVSKKKLQLCQQEVVYLGQLLTPEGRKILPDRKVTVSQFQQPTTIRQIRAFLGLVGYCRHWIPEFSIHSKFLEKQLKPDTAEPFQLDDQQVEAFNKLKHAITTAPVLVVPDPAKPFQLYTSHSEHASIAVLTQKHAGRTRPIAFLSSKFDAIESGLPPCLKACASIHRSLTQADSFILGAPLIIYTTHAICTLLQRDRSQLVTASRFSKWEADLLRPELTFVACSAVSPAHLYMQSCENNIPPHDCVLLTHTISRPRPDLSDLPIPDPDMTLFSDGSYTTGRGGAAVVMHRPVTDDFIIIHQQPGGASAQTAELLALAAACHLATDKTVNIYTDSRYAYGVVHDFGHLWMHRGFVTSAGTPIKNHKEIEYLLKQIMKPKQVSVIKIEAHTKGVSMEVRGNAAADEAAKNAVFLVQR

SEQ ID NO: 8130 - protein, 650 aa, synthetic construct
SCQTKNTLNIDEYLLQFPDQLWASLPTDIGRMLVPPITIKIKDNASLPSIRQYPLPKDKTEGLRPLISSLENQGILIKCHSPCNTPIFPIKKAGRDEYRMIHDLRAINNIVAPLTAVVASPTTVLSNLAPSLHWFTVIDLSNAFFSVPIHKDSQYLFAFTFEGHQYTWTVLPQGFIHSPTLFNQALYQSLHKIKFKISSEICIYMDDVLIASKDRDTNLKDTAVMLQHLASEGHKVSKKKLQLCQQEVVYLGQLLTPEGRKILPDRKVTVSQFQQPTTIRQIRAFLGKVGYCRHFIPEFSIHSKFLEKQLKPDTAEPFQLDDQQVEAFNKLKHAITTAPVLVVPDPAKPFQLYTSHSEHASIAVLTQKHAGRTRPIAFLSSKFDAIESGLPPCLKACASIHRSLTQADSFILGAPLIIYTTHAICTLLQRDRSQLVTASRFSKWEADLLRPELTFVACSAVSPAHLYMQSCENNIPPHDCVLLTHTISRPRPDLSDLPIPDPDMTLFSDGSYTTGRGGAAVVMHRPVTDDFIIIHQQPGGASAQTAELLALAAACHLATDKTVNIYTDSRYAYGVVHDFGHLWMHRGFVTSAGTPIKNHKEIEYLLKQIMKPKQVSVIKIEAHTKGVSMEVRGNAAADEAAKNAVFLVQR

SEQ ID NO: 8131 - protein, 669 aa, Woolly monkey sarcoma virus
VLNLEEEYRLHEKPVPSSIDPSWLQLFPTVWAERAGMGLANQVPPVVVELRSGASPVAVRQYPMSKEAREGIRPHIQRFLDLGVLVPCQSPWNTPLLPVKKPGTNDYRPVQDLREINKRVQDIHPTVPNPYNLLSSLPPSHTWYSVLDLKDAFFCLKLHPNSQPLFAFEWRDPEKGNTGQLTWTRLPQGFKNSPTLFDEALHRDLAPFRALNPQVVLLQYVDDLLVAAPTYRDCKEGTQKLLQELSKLGYRVSAKKAQLCQKEVTYLGYLLKEGKRWLTPARKATVMKIPPPTTPRQVREFLGTAGFCRLWIPGFASLAAPLYPLTKESIPFIWTEEHQKAFDRIKEALLSAPALALPDLTKPFTLYVDERAGVARGVLTQTLGPWRRPVAYLSKKLDPVASGWPTCLKAVAAVALLLKDADKLTLGQNVTVIASHSLESIVRQPPDRWMTNARMTHYQSLLLNERVSFAPPAVLNPATLLPVESEATPVHRCSEILAEETGTRRDLKDQPLPGVPAWYTDGSSFIAEGKRRAGAAIVDGKRTVWASSLPEGTSAQKAELVALTQALRLAEGKDINIYTDSRYAFATAHIHGAIYKQRGLLTSAGKDIKNKEEILALLEAIHLPKRVAIIHCPGHQKGNDPVATGNRRADEAAKQAALSTRVLAETTKP

SEQ ID NO: 8132 - protein, 669 aa, synthetic construct
VLNLEEEYRLHEKPVPSSIDPSWLQLFPTVWAERAGMGLANQVPPVVVELRSGASPVAVRQYPMSKEAREGIRPHIQRFLDLGVLVPCQSPWNTPLLPVKKPGTNDYRPVQDLREINKRVQDIHPTVPNPYNLLSSLPPSHTWYSVLDLKDAFFCLKLHPNSQPLFAFEWRDPEKGNTGQLTWTRLPQGFKNSPTLFNEALHRDLAPFRALNPQVVLLQYVDDLLVAAPTYRDCKEGTQKLLQELSKLGYRVSAKKAQLCQKEVTYLGYLLKEGKRWLTPARKATVMKIPPPTTPRQVREFLGTAGFCRLWIPGFASLAAPLYPLTKPSIPFIWTEEHQKAFDRIKEALLSAPALALPDLTKPFTLYVDERAGVARGVLTQTLGPWRRPVAYLSKKLDPVASGWPTCLKAVAAVALLLKDADKLTLGQNVTVIASHSLESIVRQPPDRWMTNARMTHYQSLLLNERVSFAPPAVLNPATLLPVESEATPVHRCSEILAEETGTRRDLKDQPLPGVPAWYTDGSSFIAEGKRRAGAAIVDGKRTVWASSLPEGTSAQKAELVALTQALRLAEGKDINIYTDSRYAFATAHIHGAIYKQRGWLTSAGKDIKNKEEILALLEAIHLPKRVAIIHCPGHQKGNDPVATGNRRADEAAKQAALSTRVLAETTKP

SEQ ID NO: 8133 - protein, 669 aa, synthetic construct
VLNLEEEYRLHEKPVPSSIDPSWLQLFPTVWAERAGMGLANQVPPVVVELRSGASPVAVRQYPMSKEAREGIRPHIQRFLDLGVLVPCQSPWNTPLLPVKKPGTNDYRPVQDLREINKRVQDIHPTVPNPYNLLSSLPPSHTWYSVLDLKDAFFCLKLHPNSQPLFAFEWRDPEKGNTGQLTWTRLPQGFKNSPTLFNEALHRDLAPFRALNPQVVLLQYVDDLLVAAPTYRDCKEGTQKLLQELSKLGYRVSAKKAQLCQKEVTYLGYLLKEGKRWLTPARKATVMKIPPPTTPRQVREFLGKAGFCRLFIPGFASLAAPLYPLTKPSIPFIWTEEHQKAFDRIKEALLSAPALALPDLTKPFTLYVDERAGVARGVLTQTLGPWRRPVAYLSKKLDPVASGWPTCLKAVAAVALLLKDADKLTLGQNVTVIASHSLESIVRQPPDRWMTNARMTHYQSLLLNERVSFAPPAVLNPATLLPVESEATPVHRCSEILAEETGTRRDLKDQPLPGVPAWYTDGSSFIAEGKRRAGAAIVDGKRTVWASSLPEGTSAQKAELVALTQALRLAEGKDINIYTDSRYAFATAHIHGAIYKQRGWLTSAGKDIKNKEEILALLEAIHLPKRVAIIHCPGHQKGNDPVATGNRRADEAAKQAALSTRVLAETTKP

SEQ ID NO: 8134 - protein, 671 aa, unidentified
TLNIEDEYRLHETSKEPDVPLGSTWLSDFPQAWAETGGMGLAVRQAPLIIPLKATSTPVSIKQYPMSQEARLGIKPHIQRLLDQGILVPCQSPWNTPLLPVKKPGTNDYRPVQDLREVNKRVEDIHPTVPNPYNLLSGLPPSHQWYTVLDLKDAFFCLRLHPTSQPLFAFEWRDPEMGISGQLTWTRLPQGFKNSPTLFDEALHRDLADFRIQHPDLILLQYVDDLLLAATSEQDCQRGTRALLQTLGNLGYRASAKKAQICQKQVKYLGYLLKEGQRWLTEARKETVMGQPTPKTPRQLREFLGTAGFCRLWIPGFAEMAAPLYPLTKTGTLFNWGPDQQKAYQEIKQALLTAPALGLPDLTKPFELFVDEKQGYAKGVLTQKLGPWRRPVAYLSKKLDPVAAGWPPCLRMVAAIAVLTKDAGKLTMGQPLVILAPHAVEALVKQPPDRWLSNARMTHYQAMLLDTDRVQFGPVVALNPATLLPLPEKEAPHDCLEILAETHGTRPDLTDQPIPDADYTWYTDGSSFLQEGQRRAGAAVTTETEVIWARALPAGTSAQRAELIALTQALKMAEGKKLNVYTDSRYAFATAHVHGEIYRRRGLLTSEGREIKNKNEILALLKALFLPKRLSIIHCPGHQKGNSAEARGNRMADQAAREAAMKAVLETSTLL

SEQ ID NO: 8135 - protein, 671 aa, synthetic construct
TLNIEDEYRLHETSKEPDVPLGSTWLSDFPQAWAETGGMGLAVRQAPLIIPLKATSTPVSIKQYPMSQEARLGIKPHIQRLLDQGILVPCQSPWNTPLLPVKKPGTNDYRPVQDLREVNKRVEDIHPTVPNPYNLLSGLPPSHQWYTVLDLKDAFFCLRLHPTSQPLFAFEWRDPEMGISGQLTWTRLPQGFKNSPTLFNEALHRDLADFRIQHPDLILLQYVDDLLLAATSEQDCQRGTRALLQTLGNLGYRASAKKAQICQKQVKYLGYLLKEGQRWLTEARKETVMGQPTPKTPRQLREFLGTAGFCRLWIPGFAEMAAPLYPLTKPGTLFNWGPDQQKAYQEIKQALLTAPALGLPDLTKPFELFVDEKQGYAKGVLTQKLGPWRRPVAYLSKKLDPVAAGWPPCLRMVAAIAVLTKDAGKLTMGQPLVILAPHAVEALVKQPPDRWLSNARMTHYQAMLLDTDRVQFGPVVALNPATLLPLPEKEAPHDCLEILAETHGTRPDLTDQPIPDADYTWYTDGSSFLQEGQRRAGAAVTTETEVIWARALPAGTSAQRAELIALTQALKMAEGKKLNVYTDSRYAFATAHVHGEIYRRRGWLTSEGREIKNKNEILALLKALFLPKRLSIIHCPGHQKGNSAEARGNRMADQAAREAAMKAVLETSTLL

SEQ ID NO: 8136 - protein, 671 aa, synthetic construct
TLNIEDEYRLHETSKEPDVPLGSTWLSDFPQAWAETGGMGLAVRQAPLIIPLKATSTPVSIKQYPMSQEARLGIKPHIQRLLDQGILVPCQSPWNTPLLPVKKPGTNDYRPVQDLREVNKRVEDIHPTVPNPYNLLSGLPPSHQWYTVLDLKDAFFCLRLHPTSQPLFAFEWRDPEMGISGQLTWTRLPQGFKNSPTLFNEALHRDLADFRIQHPDLILLQYVDDLLLAATSEQDCQRGTRALLQTLGNLGYRASAKKAQICQKQVKYLGYLLKEGQRWLTEARKETVMGQPTPKTPRQLREFLGKAGFCRLFIPGFAEMAAPLYPLTKPGTLFNWGPDQQKAYQEIKQALLTAPALGLPDLTKPFELFVDEKQGYAKGVLTQKLGPWRRPVAYLSKKLDPVAAGWPPCLRMVAAIAVLTKDAGKLTMGQPLVILAPHAVEALVKQPPDRWLSNARMTHYQAMLLDTDRVQFGPVVALNPATLLPLPEKEAPHDCLEILAETHGTRPDLTDQPIPDADYTWYTDGSSFLQEGQRRAGAAVTTETEVIWARALPAGTSAQRAELIALTQALKMAEGKKLNVYTDSRYAFATAHVHGEIYRRRGWLTSEGREIKNKNEILALLKALFLPKRLSIIHCPGHQKGNSAEARGNRMADQAAREAAMKAVLETSTLL

SEQ ID NO: 8137 - protein, 46 aa, synthetic construct; identical to SEQ ID NO: 5217

SEQ ID NO: 8138 - protein, 46 aa, synthetic construct; identical to SEQ ID NO: 5217

SEQ ID NO: 8139 - protein, 46 aa, synthetic construct; identical to SEQ ID NO: 5217

SEQ ID NO: 8140 - protein, 46 aa, synthetic construct; identical to SEQ ID NO: 5217

SEQ ID NO: 8141 - protein, 20 aa, synthetic construct
GGGGSGGGGSGGGGSGGGGS

SEQ ID NO: 8142 - protein, 30 aa, synthetic construct; identical to SEQ ID NO: 5112

SEQ ID NO: 8143 - protein, 30 aa, synthetic construct; identical to SEQ ID NO: 5112

SEQ ID NO: 8144 - protein, 18 aa, synthetic construct
GSSGSSGSSGSSGSSGSS

SEQ ID NO: 8145 - protein, 20 aa, synthetic construct
EAAAKEAAAKEAAAKEAAAK

SEQ ID NO: 8146 - protein, 30 aa, synthetic construct; identical to SEQ ID NO: 5130

SEQ ID NO: 8147 - protein, 11 aa, synthetic construct
PAPAPAPAPAP

SEQ ID NO: 8148 - protein, 13 aa, synthetic construct
PAPAPAPAPAPAP

SEQ ID NO: 8149 - protein, 13 aa, synthetic construct
PAPAPAPAPAPAP

SEQ ID NO: 8150 - protein, 13 aa, synthetic construct
PAPAPAPAPAPAP

SEQ ID NO: 8151 - protein, 13 aa, synthetic construct
PAPAPAPAPAPAP

SEQ ID NO: 8152 - protein, 13 aa, synthetic construct
PAPAPAPAPAPAP

SEQ ID NO: 8153 - protein, 8 aa, synthetic construct
EAAAKGGG

SEQ ID NO: 8154 - protein, 8 aa, synthetic construct
EAAAKGGG

SEQ ID NO: 8155 - protein, 6 aa, synthetic construct
PAPGGG

SEQ ID NO: 8156 - protein, 9 aa, synthetic construct
GGGGSSGGS

SEQ ID NO: 8157 - protein, 11 aa, synthetic construct
GGGGGSEAAAK

SEQ ID NO: 8158 - protein, 11 aa, synthetic construct
GGGEAAAKGGS

SEQ ID NO: 8159 - protein, 11 aa, synthetic construct
GGGEAAAKGGS

SEQ ID NO: 8160 - protein, 11 aa, synthetic construct
GGGEAAAKGGS

SEQ ID NO: 8161 - protein, 9 aa, synthetic construct
GGSGGGPAP

SEQ ID NO: 8162 - protein, 9 aa, synthetic construct
PAPGGSGGG

SEQ ID NO: 8163 - protein, 9 aa, synthetic construct
PAPGGSGGG

SEQ ID NO: 8164 - protein, 11 aa, synthetic construct
GGSEAAAKPAP

SEQ ID NO: 8165 - protein, 11 aa, synthetic construct
GGSPAPEAAAK

SEQ ID NO: 8166 - protein, 11 aa, synthetic construct
GGSPAPEAAAK

SEQ ID NO: 8167 - protein, 11 aa, synthetic construct
EAAAKGGSPAP

SEQ ID NO: 8168 - protein, 11 aa, synthetic construct
EAAAKGGSPAP

SEQ ID NO: 8169 - protein, 11 aa, synthetic construct
EAAAKPAPGGS

SEQ ID NO: 8170 - protein, 11 aa, synthetic construct
EAAAKPAPGGS

SEQ ID NO: 8171 - protein, 11 aa, synthetic construct
GGGGSSEAAAK

SEQ ID NO: 8172 - protein, 11 aa, synthetic construct
GGGGSSEAAAK

SEQ ID NO: 8173 - protein, 11 aa, synthetic construct
GSSGGGEAAAK

SEQ ID NO: 8174 - protein, 11 aa, synthetic construct
GSSGGGEAAAK

SEQ ID NO: 8175 - protein, 11 aa, synthetic construct
GSSEAAAKGGG

SEQ ID NO: 8176 - protein, 9 aa, synthetic construct
GSSGGGPAP

SEQ ID NO: 8177 - protein, 9 aa, synthetic construct
GSSPAPGGG

SEQ ID NO: 8178 - protein, 9 aa, synthetic construct
PAPGGGGSS

SEQ ID NO: 8179 - protein, 11 aa, synthetic construct
GGGEAAAKPAP

SEQ ID NO: 8180 - protein, 11 aa, synthetic construct
GGGEAAAKPAP

SEQ ID NO: 8181 - protein, 11 aa, synthetic construct
GGGPAPEAAAK

SEQ ID NO: 8182 - protein, 11 aa, synthetic construct
GSSEAAAKPAP

SEQ ID NO: 8183 - protein, 11 aa, synthetic construct
GSSEAAAKPAP

SEQ ID NO: 8184 - protein, 11 aa, synthetic construct
GSSPAPEAAAK

SEQ ID NO: 8185 - protein, 11 aa, synthetic construct
GSSPAPEAAAK

SEQ ID NO: 8186 - protein, 11 aa, synthetic construct
GSSPAPEAAAK

SEQ ID NO: 8187 - protein, 11 aa, synthetic construct
PAPGSSEAAAK

SEQ ID NO: 8188 - protein, 11 aa, synthetic construct
PAPGSSEAAAK

SEQ ID NO: 8189 - protein, 46 aa, synthetic construct; identical to SEQ ID NO: 5217

SEQ ID NO: 8190 - protein, 46 aa, synthetic construct; identical to SEQ ID NO: 5217

SEQ ID NO: 8191 - protein, 46 aa, synthetic construct; identical to SEQ ID NO: 5217

SEQ ID NO: 8192 - protein, 46 aa, synthetic construct; identical to SEQ ID NO: 5217

SEQ ID NO: 8193 - protein, 46 aa, synthetic construct; identical to SEQ ID NO: 5217

SEQ ID NO: 8194 - protein, 46 aa, synthetic construct; identical to SEQ ID NO: 5217

SEQ ID NO: 8195 - protein, 46 aa, synthetic construct; identical to SEQ ID NO: 5217

SEQ ID NO: 8196 - protein, 16 aa, synthetic construct
SGSETPGTSESATPES

SEQ ID NO: 8197 - protein, 1367 aa, synthetic construct
DKKYSIGLDIGTNSVGWAVITDEYKVPSKKFKVLGNTDRHSIKKNLIGALLFDSGETAEATRLKRTARRRYTRRKNRICYLQEIFSNEMAKVDDSFFHRLEESFLVEEDKKHERHPIFGNIVDEVAYHEKYPTIYHLRKKLVDSTDKADLRLIYLALAHMIKFRGHFLIEGDLNPDNSDVDKLFIQLVQTYNQLFEENPINASGVDAKAILSARLSKSRRLENLIAQLPGEKKNGLFGNLIALSLGLTPNFKSNFDLAEDAKLQLSKDTYDDDLDNLLAQIGDQYADLFLAAKNLSDAILLSDILRVNTEITKAPLSASMIKRYDEHHQDLTLLKALVRQQLPEKYKEIFFDQSKNGYAGYIDGGASQEEFYKFIKPILEKMDGTEELLVKLNREDLLRKQRTFDNGSIPHQIHLGELHAILRRQEDFYPFLKDNREKIEKILTFRIPYYVGPLARGNSRFAWMTRKSEETITPWNFEEVVDKGASAQSFIERMTNFDKNLPNEKVLPKHSLLYEYFTVYNELTKVKYVTEGMRKPAFLSGEQKKAIVDLLFKTNRKVTVKQLKEDYFKKIECFDSVEISGVEDRFNASLGTYHDLLKIIKDKDFLDNEENEDILEDIVLTLTLFEDREMIEERLKTYAHLFDDKVMKQLKRRRYTGWGRLSRKLINGIRDKQSGKTILDFLKSDGFANRNFMQLIHDDSLTFKEDIQKAQVSGQGDSLHEHIANLAGSPAIKKGILQTVKVVDELVKVMGRHKPENIVIEMARENQTTQKGQKNSRERMKRIEEGIKELGSQILKEHPVENTQLQNEKLYLYYLQNGRDMYVDQELDINRLSDYDVDHIVPQSFLKDDSIDNKVLTRSDKARGKSDNVPSEEVVKKMKNYWRQLLNAKLITQRKFDNLTKAERGGLSELDKAGFIKRQLVETRQITKHVAQILDSRMNTKYDENDKLIREVKVITLKSKLVSDFRKDFQFYKVREINNYHHAHDAYLNAVVGTALIKKYPKLESEFVYGDYKVYDVRKMIAKSEQEIGKATAKYFFYSNIMNFFKTEITLANGEIRKRPLIETNGETGEIVWDKGRDFATVRKVLSMPQVNIVKKTEVQTGGFSKESILPKRNSDKLIARKKDWDPKKYGGFDSPTVAYSVLVVAKVEKGKSKKLKSVKELLGITIMERSSFEKNPIDFLEAKGYKEVKKDLIIKLPKYSLFELENGRKRMLASAGELQKGNELALPSKYVNFLYLASHYEKLKGSPEDNEQKQLFVEQHKHYLDEIIEQISEFSKRVILADANLDKVLSAYNKHRDKPIREQAENIIHLFTLTNLGAPAAFKYFDTTIDRKRYTSTKEVLDATLIHQSITGLYETRIDLSQLGGD

SEQ ID NO: 8198 - protein, 10 aa, synthetic construct
KRTADGSEFE

SEQ ID NO: 8199 - protein, 19 aa, synthetic construct
KRTADGSEFESPKKKAKVE

SEQ ID NO: 8200 - protein, 29 aa, synthetic construct
KRTADGSEFEKRTADGSEFESPKKKAKVE

SEQ ID NO: 8201 - RNA, 129 nt, synthetic construct
  source 1..129: mol_type = other RNA
aaaaaaaaaaaaaaaaaaaaaaaaaaaaaaggaaaaaaaaaaaaaaaaaaaaaaaaaaaaaagggaaaaaaaaaaaaaaaaaaaaaaaaaaaaaaggggaaaaaaaaaaaaaaaaaaaaaaaaaaaaaa

SEQ ID NO: 8202 - RNA, 129 nt, synthetic construct
  source 1..129: mol_type = other RNA
aaaaaaaaaaaaaaaaaaaaaaaaaaaaaaccaaaaaaaaaaaaaaaaaaaaaaaaaaaaaacccaaaaaaaaaaaaaaaaaaaaaaaaaaaaaaccccaaaaaaaaaaaaaaaaaaaaaaaaaaaaaa

SEQ ID NO: 8203 - RNA, 129 nt, synthetic construct
  source 1..129: mol_type = other RNA
aaaaaaaaaaaaaaaaaaaaaaaaaaaaaattaaaaaaaaaaaaaaaaaaaaaaaaaaaaaatttaaaaaaaaaaaaaaaaaaaaaaaaaaaaaattttaaaaaaaaaaaaaaaaaaaaaaaaaaaaaa

SEQ ID NO: 8204 - RNA, 139 nt, synthetic construct
  source 1..139: mol_type = other RNA
aaaaaaaaaaaaaaaaaaaaaaaaaaaaaaggggaaaaaaaaaaaaaaaaaaaaaaaaaaaaaaggggggaaaaaaaaaaaaaaaaaaaaaaaaaaaaaaaggggggggaaaaaaaaaaaaaaaaaaaaaaaaaaaaaa

SEQ ID NO: 8205 - RNA, 138 nt, synthetic construct
  source 1..138: mol_type = other RNA
aaaaaaaaaaaaaaaaaaaaaaaaaaaaaaccccaaaaaaaaaaaaaaaaaaaaaaaaaaaaaaccccccaaaaaaaaaaaaaaaaaaaaaaaaaaaaaaccccccccaaaaaaaaaaaaaaaaaaaaaaaaaaaaaa

SEQ ID NO: 8206 - RNA, 138 nt, synthetic construct
  source 1..138: mol_type = other RNA
aaaaaaaaaaaaaaaaaaaaaaaaaaaaaattttaaaaaaaaaaaaaaaaaaaaaaaaaaaaaattttttaaaaaaaaaaaaaaaaaaaaaaaaaaaaaattttttttaaaaaaaaaaaaaaaaaaaaaaaaaaaaaa

SEQ ID NO: 8207 - RNA, 138 nt, synthetic construct
  source 1..138: mol_type = other RNA
aaaaaaaaaaaaaaaaaaaaaaaaaaaaaagcccaaaaaaaaaaaaaaaaaaaaaaaaaaaaaacccgccaaaaaaaaaaaaaaaaaaaaaaaaaaaaaacgccgccgaaaaaaaaaaaaaaaaaaaaaaaaaaaaaa

SEQ ID NO: 8208 - RNA, 138 nt, synthetic construct
  source 1..138: mol_type = other RNA
aaaaaaaaaaaaaaaaaaaaaaaaaaaaaggtgaaaaaaaaaaaaaaaaaaaaaaaaaaaaaaattgtgtaaaaaaaaaaaaaaaaaaaaaaaaaaaaaagttgtgttaaaaaaaaaaaaaaaaaaaaaaaaaaaaaa

SEQ ID NO: 8209 - RNA, 137 nt, synthetic construct
  source 1..137: mol_type = other RNA
aaaaaaaaaaaaaaaaaaaaaaaaaaaaattccaaaaaaaaaaaaaaaaaaaaaaaaaaaaaacttctcaaaaaaaaaaaaaaaaaaaaaaaaaaaaaatctctcttaaaaaaaaaaaaaaaaaaaaaaaaaaaaaa

SEQ ID NO: 8210 - RNA, 138 nt, synthetic construct
  source 1..138: mol_type = other RNA
aaaaaaaaaaaaaaaaaaaaaaaaaaaaaagttcaaaaaaaaaaaaaaaaaaaaaaaaaaaaaatcttccaaaaaaaaaaaaaaaaaaaaaaaaaaaaaaccgtcgcgaaaaaaaaaaaaaaaaaaaaaaaaaaaaaa

SEQ ID NO: 8211 - RNA, 126 nt, synthetic construct
  source 1..126: mol_type = other RNA
aaaaaaaaaaaaaaaggaaaaaaaaaaaaaaaaaaaaaaaaaggaaaaaaaaaaaaaaaaaaaaaaaaaaaaaaaaaaaggaaaaaaaaaaaaaaaaaaaaaaaaaaaaaaaaaaaaaaaaaaaaa

SEQ ID NO: 8212 - RNA, 126 nt, synthetic construct
  source 1..126: mol_type = other RNA
aaaaaaaaaaaaaaaccaaaaaaaaaaaaaaaaaaaaaaaaaccaaaaaaaaaaaaaaaaaaaaaaaaaaaaaaaaaacccaaaaaaaaaaaaaaaaaaaaaaaaaaaaaaaaaaaaaaaaaaaaa

SEQ ID NO: 8213 - RNA, 126 nt, synthetic construct
  source 1..126: mol_type = other RNA
aaaaaaaaaaaaaaattaaaaaaaaaaaaaaaaaaaaaaaaattaaaaaaaaaaaaaaaaaaaaaaaaaaaaaaaaaaattaaaaaaaaaaaaaaaaaaaaaaaaaaaaaaaaaaaaaaaaaaaaa

SEQ ID NO: 8214 - RNA, 132 nt, synthetic construct
  source 1..132: mol_type = other RNA
aaaaaaaaaaaaaaaggggaaaaaaaaaaaaaaaaaaaaaaaaaggggaaaaaaaaaaaaaaaaaaaaaaaaaaaaaaaaaaaggggaaaaaaaaaaaaaaaaaaaaaaaaaaaaaaaaaaaaaaaaaaaaa

SEQ ID NO: 8215 - RNA, 131 nt, synthetic construct
  source 1..131: mol_type = other RNA
aaaaaaaaaaaaaaaccccaaaaaaaaaaaaaaaaaaaaaaaaaccccaaaaaaaaaaaaaaaaaaaaaaaaaaaaaaaaacccccaaaaaaaaaaaaaaaaaaaaaaaaaaaaaaaaaaaaaaaaaaaaa

SEQ ID NO: 8216 - RNA, 132 nt, synthetic construct
  source 1..132: mol_type = other RNA
aaaaaaaaaaaaaaattttaaaaaaaaaaaaaaaaaaaaaaaaattttaaaaaaaaaaaaaaaaaaaaaaaaaaaaaaaaaaattttaaaaaaaaaaaaaaaaaaaaaaaaaaaaaaaaaaaaaaaaaaaaa

SEQ ID NO: 8217 - RNA, 144 nt, synthetic construct
  source 1..144: mol_type = other RNA
aaaaaaaaaaaaaaaggggggggaaaaaaaaaaaaaaaaaaaaaaaaaggggggggaaaaaaaaaaaaaaaaaaaaaaaaaaaaaaaaaaaggggggggaaaaaaaaaaaaaaaaaaaaaaaaaaaaaaaaaaaaaaaaaaaaa

SEQ ID NO: 8218 - RNA, 144 nt, synthetic construct
  source 1..144: mol_type = other RNA
aaaaaaaaaaaaaaaccccccccaaaaaaaaaaaaaaaaaaaaaaaaaccccccccaaaaaaaaaaaaaaaaaaaaaaaaaaaaaaaaaacccccccccaaaaaaaaaaaaaaaaaaaaaaaaaaaaaaaaaaaaaaaaaaaaa

SEQ ID NO: 8219 - RNA, 144 nt, synthetic construct
  source 1..144: mol_type = other RNA
aaaaaaaaaaaaaaattttttttaaaaaaaaaaaaaaaaaaaaaaaaattttttttaaaaaaaaaaaaaaaaaaaaaaaaaaaaaaaaaaattttttttaaaaaaaaaaaaaaaaaaaaaaaaaaaaaaaaaaaaaaaaaaaaa

SEQ ID NO: 8220 - RNA, 144 nt, synthetic construct
  source 1..144: mol_type = other RNA
aaaaaaaaaaaaaaaccgccccgaaaaaaaaaaaaaaaaaaaaaaaaagcccgcccaaaaaaaaaaaaaaaaaaaaaaaaaaaaaaaaaaaccccgccgaaaaaaaaaaaaaaaaaaaaaaaaaaaaaaaaaaaaaaaaaaaaa

SEQ ID NO: 8221 - RNA, 144 nt, synthetic construct
  source 1..144: mol_type = other RNA
aaaaaaaaaaaaaaagttgtgttaaaaaaaaaaaaaaaaaaaaaaaaagttgtggtaaaaaaaaaaaaaaaaaaaaaaaaaaaaaaaaaaaggttgtggaaaaaaaaaaaaaaaaaaaaaaaaaaaaaaaaaaaaaaaaaaaaa

SEQ ID NO: 8222 - RNA, 143 nt, synthetic construct
  source 1..143: mol_type = other RNA
aaaaaaaaaaaaaaatcctctccaaaaaaaaaaaaaaaaaaaaaaaaattccttctaaaaaaaaaaaaaaaaaaaaaaaaaaaaaaaaacctccttctaaaaaaaaaaaaaaaaaaaaaaaaaaaaaaaaaaaaaaaaaaaaa

SEQ ID NO: 8223 - RNA, 144 nt, synthetic construct
  source 1..144: mol_type = other RNA
aaaaaaaaaaaaaaacgtcgtctaaaaaaaaaaaaaaaaaaaaaaaaactgtcgctaaaaaaaaaaaaaaaaaaaaaaaaaaaaaaaaaaacctgtcctaaaaaaaaaaaaaaaaaaaaaaaaaaaaaaaaaaaaaaaaaaaaa

SEQ ID NO: 8224 - RNA, 129 nt, synthetic construct
  source 1..129: mol_type = other RNA
aaaaaaaaaaaaaaaggaaaaaaaaaaaaaaaaaaaaaaaaagggaaaaaaaaaaaaaaaaaaaaaaaaaaaaaaaaaaaggggaaaaaaaaaaaaaaaaaaaaaaaaaaaaaaaaaaaaaaaaaaaaa

SEQ ID NO: 8225 - RNA, 129 nt, synthetic construct
  source 1..129: mol_type = other RNA
aaaaaaaaaaaaaaaccaaaaaaaaaaaaaaaaaaaaaaaaacccaaaaaaaaaaaaaaaaaaaaaaaaaaaaaaaaaaccccaaaaaaaaaaaaaaaaaaaaaaaaaaaaaaaaaaaaaaaaaaaaaa

SEQ ID NO: 8226 - RNA, 129 nt, synthetic construct
  source 1..129: mol_type = other RNA
aaaaaaaaaaaaaaattaaaaaaaaaaaaaaaaaaaaaaaaatttaaaaaaaaaaaaaaaaaaaaaaaaaaaaaaaaaatttttaaaaaaaaaaaaaaaaaaaaaaaaaaaaaaaaaaaaaaaaaaaaa

SEQ ID NO: 8227 - RNA, 138 nt, synthetic construct
  source 1..138: mol_type = other RNA
aaaaaaaaaaaaaaaggggaaaaaaaaaaaaaaaaaaaaaaaaaggggggaaaaaaaaaaaaaaaaaaaaaaaaaaaaaaaaaaaggggggggaaaaaaaaaaaaaaaaaaaaaaaaaaaaaaaaaaaaaaaaaaaaa

SEQ ID NO: 8228 - RNA, 138 nt, synthetic construct
  source 1..138: mol_type = other RNA
aaaaaaaaaaaaaaaccccaaaaaaaaaaaaaaaaaaaaaaaaaccccccaaaaaaaaaaaaaaaaaaaaaaaaaaaaaaaaaacccccccccaaaaaaaaaaaaaaaaaaaaaaaaaaaaaaaaaaaaaaaaaaaaa

SEQ ID NO: 8229 - RNA, 138 nt, synthetic construct
  source 1..138: mol_type = other RNA
aaaaaaaaaaaaaaattttaaaaaaaaaaaaaaaaaaaaaaaaattttttaaaaaaaaaaaaaaaaaaaaaaaaaaaaaaaaaaatttttttttaaaaaaaaaaaaaaaaaaaaaaaaaaaaaaaaaaaaaaaaaaaa

SEQ ID NO: 8230 - RNA, 138 nt, synthetic construct
  source 1..138: mol_type = other RNA
aaaaaaaaaaaaaaacccgaaaaaaaaaaaaaaaaaaaaaaaaacccgccaaaaaaaaaaaaaaaaaaaaaaaaaaaaaaaaaaagccgcccgaaaaaaaaaaaaaaaaaaaaaaaaaaaaaaaaaaaaaaaaaaaaa

SEQ ID NO: 8231 - RNA, 138 nt, synthetic construct
  source 1..138: mol_type = other RNA
aaaaaaaaaaaaaaaggtgaaaaaaaaaaaaaaaaaaaaaaaaattgtgtaaaaaaaaaaaaaaaaaaaaaaaaaaaaaaaaaaagtggttgtaaaaaaaaaaaaaaaaaaaaaaaaaaaaaaaaaaaaaaaaaaaaa

SEQ ID NO: 8232 - RNA, 138 nt, synthetic construct
  source 1..138: mol_type = other RNA
aaaaaaaaaaaaaaactctaaaaaaaaaaaaaaaaaaaaaaaaaccttccaaaaaaaaaaaaaaaaaaaaaaaaaaaaaaaaaaacttcttctaaaaaaaaaaaaaaaaaaaaaaaaaaaaaaaaaaaaaaaaaaaaa

SEQ ID NO: 8233 - RNA, 138 nt, synthetic construct
  source 1..138: mol_type = other RNA
aaaaaaaaaaaaaaacctgaaaaaaaaaaaaaaaaaaaaaaaaagtcccgaaaaaaaaaaaaaaaaaaaaaaaaaaaaaaaaaaattgcgctgaaaaaaaaaaaaaaaaaaaaaaaaaaaaaaaaaaaaaaaaaaaaa

SEQ ID NO: 8234 - RNA, 110 nt, synthetic construct
  source 1..110: mol_type = other RNA
aaaaaaaaaaaaaaaaaaaaaaaaaaaaaagcatatgactaaaaaaaaaaaaaaaaaaaaaaaaaaaaaaaaaaaaaaaaaaaaaaaaaaaaaaaaaaaaaaaaaaaaaa

SEQ ID NO: 8235 - RNA, 80 nt, synthetic construct
  source 1..80: mol_type = other RNA
aaaaaaaaaaaaaaaaaaaaaaaaaaaaaaaaaaaaaaaaaaaaaaaaaaaaaaaaaaaaaaaaaaaaaaaaaaaaaaaa

SEQ ID NO: 8236 - RNA, 47 nt, synthetic construct
  source 1..47: mol_type = other RNA
aggaaataagagagaaaagaagagtaagaagaaatataagagccacc

SEQ ID NO: 8237 - DNA, 81 bp, synthetic construct
  source 1..81: mol_type = other DNA
agcggctcggagacgccgggcaccagcgagtcggcgacgccggagtcggtcagcgggtggaggctcttcaagaagatcagc

SEQ ID NO: 8238 - RNA, 115 nt, synthetic construct
  source 1..115: mol_type = other RNA
aaaaacatcgctggagcctcggtggccatgcttcttgccccttgggcctccccccagcccctcctccccttcctgcacccgtacccccgtggtctttgaataaagtctgaagctt

SEQ ID NO: 8239 - protein, 2122 aa, synthetic construct
MPAAKRVKLDGGDKKYSIGLDIGTNSVGWAVITDEYKVPSKKFKVLGNTDRHSIKKNLIGALLFDSGETAEATRLKRTARRRYTRRKNRICYLQEIFSNEMAKVDDSFFHRLEESFLVEEDKKHERHPIFGNIVDEVAYHEKYPTIYHLRKKLVDSTDKADLRLIYLALAHMIKFRGHFLIEGDLNPDNSDVDKLFIQLVQTYNQLFEENPINASGVDAKAILSARLSKSRRLENLIAQLPGEKKNGLFGNLIALSLGLTPNFKSNFDLAEDAKLQLSKDTYDDDLDNLLAQIGDQYADLFLAAKNLSDAILLSDILRVNTEITKAPLSASMIKRYDEHHQDLTLLKALVRQQLPEKYKEIFFDQSKNGYAGYIDGGASQEEFYKFIKPILEKMDGTEELLVKLNREDLLRKQRTFDNGSIPHQIHLGELHAILRRQEDFYPFLKDNREKIEKILTFRIPYYVGPLARGNSRFAWMTRKSEETITPWNFEEVVDKGASAQSFIERMTNFDKNLPNEKVLPKHSLLYEYFTVYNELTKVKYVTEGMRKPAFLSGEQKKAIVDLLFKTNRKVTVKQLKEDYFKKIECFDSVEISGVEDRFNASLGTYHDLLKIIKDKDFLDNEENEDILEDIVLTLTLFEDREMIEERLKTYAHLFDDKVMKQLKRRRYTGWGRLSRKLINGIRDKQSGKTILDFLKSDGFANRNFMQLIHDDSLTFKEDIQKAQVSGQGDSLHEHIANLAGSPAIKKGILQTVKVVDELVKVMGRHKPENIVIEMARENQTTQKGQKNSRERMKRIEEGIKELGSQILKEHPVENTQLQNEKLYLYYLQNGRDMYVDQELDINRLSDYDVDHIVPQSFLKDDSIDNKVLTRSDKARGKSDNVPSEEVVKKMKNYWRQLLNAKLITQRKFDNLTKAERGGLSELDKAGFIKRQLVETRQITKHVAQILDSRMNTKYDENDKLIREVKVITLKSKLVSDFRKDFQFYKVREINNYHHAHDAYLNAVVGTALIKKYPKLESEFVYGDYKVYDVRKMIAKSEQEIGKATAKYFFYSNIMNFFKTEITLANGEIRKRPLIETNGETGEIVWDKGRDFATVRKVLSMPQVNIVKKTEVQTGGFSKESILPKRNSDKLIARKKDWDPKKYGGFDSPTVAYSVLVVAKVEKGKSKKLKSVKELLGITIMERSSFEKNPIDFLEAKGYKEVKKDLIIKLPKYSLFELENGRKRMLASAGELQKGNELALPSKYVNFLYLASHYEKLKGSPEDNEQKQLFVEQHKHYLDEIIEQISEFSKRVILADANLDKVLSAYNKHRDKPIREQAENIIHLFTLTNLGAPAAFKYFDTTIDRKRYTSTKEVLDATLIHQSITGLYETRIDLSQLGGDSGGSSGGSSGSETPGTSESATPESSGGSSGGSSTLNIEDEYRLHETSKEPDVSLGSTWLSDFPQAWAETGGMGLAVRQAPLIIPLKATSTPVSIKQYPMSQEARLGIKPHIQRLLDQGILVPCQSPWNTPLLPVKKPGTNDYRPVQDLREVNKRVEDIHPTVPNPYNLLSGLPPSHQWYTVLDLKDAFFCLRLHPTSQPLFAFEWRDPEMGISGQLTWTRLPQGFKNSPTLFNEALHRDLADFRIQHPDLILLQYVDDLLLAATSELDCQQGTRALLQTLGNLGYRASAKKAQICQKQVKYLGYLLKEGQRWLTEARKETVMGQPTPKTPRQLREFLGKAGFCRLFIPGFAEMAAPLYPLTKPGTLFNWGPDQQKAYQEIKQALLTAPALGLPDLTKPFELFVDEKQGYAKGVLTQKLGPWRRPVAYLSKKLDPVAAGWPPCLRMVAAIAVLTKDAGKLTMGQPLVILAPHAVEALVKQPPDRWLSNARMTHYQALLLDTDRVQFGPVVALNPATLLPLPEEGLQHNCLDILAEAHGTRPDLTDQPLPDADHTWYTDGSSLLQEGQRKAGAAVTTETEVIWAKALPAGTSAQRAELIALTQALKMAEGKKLNVYTDSRYAFATAHIHGEIYRRRGWLTSEGKEIKNKDEILALLKALFLPKRLSIIHCPGHQKGHSAEARGNRMADQAARKAAITETPDTSTLLIENSSPSGGSKRTADGSEFEKRTADGSEFESPKKKAKVE

SEQ ID NO: 8240 - RNA, 122 nt, synthetic construct
  source 1..122: mol_type = other RNA
gccgaagcactgcacgccgtgttttagagctagaaatagcaagttaaaataaggctagtccgttatcaacttgaaaaagtggcaccgagtcggtgcaccctgacgtacggcgtgcagtgctt

SEQ ID NO: 8241 - RNA, 20 nt, synthetic construct
  source 1..20: mol_type = other RNA
ggagcggtaatgcctggtgg

SEQ ID NO: 8242 - RNA, 20 nt, synthetic construct
  source 1..20: mol_type = other RNA
ggagcagtaatggctggtgg

SEQ ID NO: 8243 - RNA, 126 nt, synthetic construct
  source 1..126: mol_type = other RNA
tcagaggaagctgggccaccgttttagagctagaaatagcaagttaaaataaggctagtccgttatcaacttgaaaaagtggcaccgagtcggtgctggagcagtaatggctggtggcccagcttc

SEQ ID NO: 8244 - RNA, 100 nt, synthetic construct
  source 1..100: mol_type = other RNA
ttaccaactttctccatggcgttttagagctagaaatagcaagttaaaataaggctagtccgttatcaacttgaaaaagtggcaccgagtcggtgctttt

SEQ ID NO: 8245 - RNA, 50 nt, synthetic construct
  source 1..50: mol_type = other RNA
aggataatatacttacatacttactaattaatactaaactcaacgccacc

SEQ ID NO: 8246 - RNA, 74 nt, synthetic construct
  source 1..74: mol_type = other RNA
ttgccatgtgtatgtgggttttttttttcccacatactctgatgatccttttttttttggatcattcatggcaa

SEQ ID NO: 8247 - RNA, 70 nt, synthetic construct
  source 1..70: mol_type = other RNA
aggacaacaataactctaataaacaaacgaattctattatatcaccacattatatctctaatctgccacc

SEQ ID NO: 8248 - RNA, 14 nt, synthetic construct
  source 1..14: mol_type = other RNA
ttgcgttcgcgcaa

SEQ ID NO: 8249 - RNA, 47 nt, synthetic construct; identical to SEQ ID NO: 8236
  source 1..47: mol_type = other RNA

SEQ ID NO: 8250 - RNA, 101 nt, synthetic construct
  source 1..101: mol_type = other RNA
gctggagcctcggtggccatgcttcttgccccttgggcctccccccagcccctcctccccttcctgcacccgtacccccgtggtctttgaataaagtctga

SEQ ID NO: 8251 - RNA, 71 nt, synthetic construct
  source 1..71: mol_type = other RNA
aggcaaaaatcaaaatcaatcatcatcacaacatcaacaatcaatcatcaacacatcatcaagacaccacc

SEQ ID NO: 8252 - protein, 19 aa, synthetic construct
KRTADGSEFESPKKKRKVE

SEQ ID NO: 8253 - RNA, 138 nt, synthetic construct
  source 1..138: mol_type = other RNA
gccgaggccgccgccaaggaggccgccgccaaggaggccgccgccaaggaggccgccgccaaggccctggaggccgaggccgccgccaaggaggccgccgccaaggaggccgccgccaaggaggccgccgccaaggcc

SEQ ID NO: 8254 - protein, 46 aa, synthetic construct; identical to SEQ ID NO: 5217

SEQ ID NO: 8255 - RNA, 33 nt, synthetic construct
  source 1..33: mol_type = other RNA
cccgccgccaagcgggtgaagctggacggcggc

SEQ ID NO: 8256 - protein, 11 aa, synthetic construct
PAAKRVKLDGG

SEQ ID NO: 8257 - RNA, 87 nt, synthetic construct
  source 1..87: mol_type = other RNA
aagcggaccgccgacggcagcgagttcgagaagcggaccgccgacggcagcgagttcgagagccccaagaagaaggccaaggtggag

SEQ ID NO: 8258 - protein, 29 aa, synthetic construct
KRTADGSEFEKRTADGSEFESPKKKAKVE

SEQ ID NO: 8259 - RNA, 592 nt, synthetic construct
  source 1..592: mol_type = other RNA
aatcaacctctggattacaaaatttgtgaaagattgactgatattcttaactatgttgctccttttacgctgtgtggatatgctgctttaatgcctctgtatcatgctattgcttcccgtacggctttcgttttctcctccttgtataaatcctggttgctgtctctttatgaggagttgtggcccgttgtccgtcaacgtggcgtggtgtgctctgtgtttgctgacgcaacccccactggctggggcattgccaccacctgtcaactcctttctgggactttcgctttccccctcccgatcgccacggcagaactcatcgccgcctgccttgcccgctgctggacaggggctaggttgctgggcactgataattccgtggtgttgtcggggaagctgacgtcctttccatggctgctcgcctgtgttgccaactggatcctgcgcgggacgtccttctgctacgtcccttcggctctcaatccagcggacctcccttcccgaggccttctgccggttctgcggcctctcccgcgtcttcgctttcggcctccgacgagtcggatctccctttgggccgcctccccgcctg

SEQ ID NO: 8260 - protein, 9 aa, synthetic construct
PAAKRVKLD

SEQ ID NO: 8261-8330 - skipped (70 entries)

SEQ ID NO: 8331 - protein, 1082 aa, synthetic construct
MAAFKPNPINYILGLDIGIASVGWAMVEIDEEENPIRLIDLGVRVFERAEVPKTGDSLAMARRLARSVRRLTRRRAHRLLRARRLLKREGVLQAADFDENGLIKSLPNTPWQLRAAALDRKLTPLEWSAVLLHLIKHRGYLSQRKNEGETADKELGALLKGVANNAHALQTGDFRTPAELALNKFEKESGHIRNQRGDYSHTFSRKDLQAELILLFEKQKEFGNPHVSGGLKEGIETLLMTQRPALSGDAVQKMLGHCTFEPAEPKAAKNTYTAERFIWLTKLNNLRILEQGSERPLTDTERATLMDEPYRKSKLTYAQARKLLGLEDTAFFKGLRYGKDNAEASTLMEMKAYHAISRALEKEGLKDKKSPLNLSSELQDEIGTAFSLFKTDEDITGRLKDRVQPEILEALLKHISFDKFVQISLKALRRIVPLMEQGKRYDEACAEIYGDHYGKKNTEEKIYLPPIPADEIRNPVVLRALSQARKVINGVVRRYGSPARIHIETAREVGKSFKDRKEIEKRQEENRKDREKAAAKFREYFPNFVGEPKSKDILKLRLYEQQHGKCLYSGKEINLVRLNEKGYVEIDHALPFSRTWDDSFNNKVLVLGSENQNKGNQTPYEYFNGKDNSREWQEFKARVETSRFPRSKKQRILLQKFDEDGFKECNLNDTRYVNRFLCQFVADHILLTGKGKRRVFASNGQITNLLRGFWGLRKVRAENDRHHALDAVVVACSTVAMQQKITRFVRYKEMNAFDGKTIDKETGKVLHQKTHFPQPWEFFAQEVMIRVFGKPDGKPEFEEADTPEKLRTLLAEKLSSRPEAVHEYVTPLFVSRAPNRKMSGAHKDTLRSAKRFVKHNEKISVKRVWLTEIKLADLENMVNYKNGREIELYEALKARLEAYGGNAKQAFDPKDNPFYKKGGQLVKAVRVEKTQESGVLLNKKNAYTIADNGDMVRVDVFCKVDKKGKNQYFIVPIYAWQVAENILPDIDCKGYRIDDSYTFCFSLHKYDLIAFQKDEKSKVEFAYYINCDSSNGRFYLAWHDKGSKEQQFRISTQNLVLIQKYQVNELGKEIRPCRLKKRPPVR

SEQ ID NO: 8332 - protein, 1055 aa, synthetic construct
MQNNPLNYILGLDLGIASIGWAVVEIDEESSPIRLIDVGVRTFERAEVAKTGESLALSRRLARSSRRLIKRRAERLKKAKRLLKAEKILHSIDEKLPINVWQLRVKGLKEKLERQEWAAVLLHLSKHRGYLSQRKNEGKSDNKELGALLSGIASNHQMLQSSEYRTPAEIAVKKFQVEEGHIRNQRGSYTHTFSRLDLLAEMELLFQRQAELGNSYTSTTLLENLTALLMWQKPALAGDAILKMLGKCTFEPSEYKAAKNSYSAERFVWLTKLNNLRILENGTERALNDNERFALLEQPYEKSKLTYAQVRAMLALSDNAIFKGVRYLGEDKKTVESKTTLIEMKFYHQIRKTLGSAELKKEWNELKGNSDLLDEIGTAFSLYKTDDDICRYLEGKLPERVLNALLENLNFDKFIQLSLKALHQILPLMLQGQRYDEAVSAIYGDHYGKKSTETTRLLPTIPADEIRNPVVLRTLTQARKVINAVVRLYGSPARIHIETAREVGKSYQDRKKLEKQQEDNRKQRESAVKKFKEMFPHFVGEPKGKDILKMRLYELQQAKCLYSGKSLELHRLLEKGYVEVDHALPFSRTWDDSFNNKVLVLANENQNKGNLTPYEWLDGKNNSERWQHFVVRVQTSGFSYAKKQRILNHKLDEKGFIERNLNDTRYVARFLCNFIADNMLLVGKGKRNVFASNGQITALLRHRWGLQKVREQNDRHHALDAVVVACSTVAMQQKITRFVRYNEGNVFSGERIDRETGEIIPLHFPSPWAFFKENVEIRIFSENPKLELENRLPDYPQYNHEWVQPLFVSRMPTRKMTGQGHMETVKSAKRLNEGLSVLKVPLTQLKLSDLERMVNRDREIALYESLKARLEQFGNDPAKAFAEPFYKKGGALVKAVRLEQTQKSGVLVRDGNGVADNASMVRVDVFTKGGKYFLVPIYTWQVAKGILPNRAATQGKDENDWDIMDEMATFQFSLCQNDLIKLVTKKKTIFGYFNGLNRATSNINIKEHDLDKSKGKLGIYLEVGVKLAISLEKYQVDELGKNIRPCRPTKRQHVR

SEQ ID NO: 8333 - protein, 1053 aa, synthetic construct
MKRNYILGLDIGITSVGYGIIDYETRDVIDAGVRLFKEANVENNEGRRSKRGARRLKRRRRHRIQRVKKLLFDYNLLTDHSELSGINPYEARVKGLSQKLSEEEFSAALLHLAKRRGVHNVNEVEEDTGNELSTKEQISRNSKALEEKYVAELQLERLKKDGEVRGSINRFKTSDYVKEAKQLLKVQKAYHQLDQSFIDTYIDLLETRRTYYEGPGEGSPFGWKDIKEWYEMLMGHCTYFPEELRSVKYAYNADLYNALNDLNNLVITRDENEKLEYYEKFQIIENVFKQKKKPTLKQIAKEILVNEEDIKGYRVTSTGKPEFTNLKVYHDIKDITARKEIIENAELLDQIAKILTIYQSSEDIQEELTNLNSELTQEEIEQISNLKGYTGTHNLSLKAINLILDELWHTNDNQIAIFNRLKLVPKKVDLSQQKEIPTTLVDDFILSPVVKRSFIQSIKVINAIIKKYGLPNDIIIELAREKNSKDAQKMINEMQKRNRQTNERIEEIIRTTGKENAKYLIEKIKLHDMQEGKCLYSLEAIPLEDLLNNPFNYEVDHIIPRSVSFDNSFNNKVLVKQEENSKKGNRTPFQYLSSSDSKISYETFKKHILNLAKGKGRISKTKKEYLLEERDINRFSVQKDFINRNLVDTRYATRGLMNLLRSYFRVNNLDVKVKSINGGFTSFLRRKWKFKKERNKGYKHHAEDALIIANADFIFKEWKKLDKAKKVMENQMFEEKQAESMPEIETEQEYKEIFITPHQIKHIKDFKDYKYSHRVDKKPNRELINDTLYSTRKDDKGNTLIVNNLNGLYDKDNDKLKKLINKSPEKLLMYHHDPQTYQKLKLIMEQYGDEKNPLYKYYEETGNYLTKYSKKDNGPVIKKIKYYGNKLNAHLDITDDYPNSRNKVVKLSLKPYRFDVYLDNGVYKFVTVKNLDVIKKENYYEVNSKCYEEAKKLKKISNQAEFIASFYNNDLIKINGELYRVIGVNNDLLNRIEVNMIDITYREYLENMNDKRPPRIIKTIASKTQSIKKYSTDILGNLYEVKSKKHPQIIKKG

SEQ ID NO: 8334 - protein, 1053 aa, synthetic construct
MKRNYILGLDIGITSVGYGIIDYETRDVIDAGVRLFKEANVENNEGRRSKRGARRLKRRRRHRIQRVKKLLFDYNLLTDHSELSGINPYEARVKGLSQKLSEEEFSAALLHLAKRRGVHNVNEVEEDTGNELSTKEQISRNSKALEEKYVAELQLERLKKDGEVRGSINRFKTSDYVKEAKQLLKVQKAYHQLDQSFIDTYIDLLETRRTYYEGPGEGSPFGWKDIKEWYEMLMGHCTYFPEELRSVKYAYNADLYNALNDLNNLVITRDENEKLEYYEKFQIIENVFKQKKKPTLKQIAKEILVNEEDIKGYRVTSTGKPEFTNLKVYHDIKDITARKEIIENAELLDQIAKILTIYQSSEDIQEELTNLNSELTQEEIEQISNLKGYTGTHNLSLKAINLILDELWHTNDNQIAIFNRLKLVPKKVDLSQQKEIPTTLVDDFILSPVVKRSFIQSIKVINAIIKKYGLPNDIIIELAREKNSKDAQKMINEMQKRNRQTNERIEEIIRTTGKENAKYLIEKIKLHDMQEGKCLYSLEAIPLEDLLNNPFNYEVDHIIPRSVSFDNSFNNKVLVKQEENSKKGNRTPFQYLSSSDSKISYETFKKHILNLAKGKGRISKTKKEYLLEERDINRFSVQKDFINRNLVDTRYATRGLMNLLRSYFRVNNLDVKVKSINGGFTSFLRRKWKFKKERNKGYKHHAEDALIIANADFIFKEWKKLDKAKKVMENQMFEEKQAESMPEIETEQEYKEIFITPHQIKHIKDFKDYKYSHRVDKKPNRKLINDTLYSTRKDDKGNTLIVNNLNGLYDKDNDKLKKLINKSPEKLLMYHHDPQTYQKLKLIMEQYGDEKNPLYKYYEETGNYLTKYSKKDNGPVIKKIKYYGNKLNAHLDITDDYPNSRNKVVKLSLKPYRFDVYLDNGVYKFVTVKNLDVIKKENYYEVNSKCYEEAKKLKKISNQAEFIASFYKNDLIKINGELYRVIGVNNDLLNRIEVNMIDITYREYLENMNDKRPPHIIKTIASKTQSIKKYSTDILGNLYEVKSKKHPQIIKKG

SEQ ID NO: 8335 - protein, 1061 aa, synthetic construct
MQENQQKQNYILGLDIGITSVGYGLIDSKTREVIDAGVRLFPEADSENNSNRRSKRGARRLKRRRIHRLNRVKDLLADYQMIDLNNVPKSTDPYTIRVKGLREPLTKEEFAIALLHIAKRRGLHNISVSMGDEEQDNELSTKQQLQKNAQQLQDKYVCELQLERLTNINKVRGEKNRFKTEDFVKEVKQLCETQRQYHNIDDQFIQQYIDLVSTRREYFEGPGNGSPYGWDGDLLKWYEKLMGRCTYFPEELRSVKYAYSADLFNALNDLNNLVVTRDDNPKLEYYEKYHIIENVFKQKKNPTLKQIAKEIGVQDYDIRGYRITKSGKPQFTSFKLYHDLKNIFEQAKYLEDVEMLDEIAKILTIYQDEISIKKALDQLPELLTESEKSQIAQLTGYTGTHRLSLKCIHIVIDELWESPENQMEIFTRLNLKPKKVEMSEIDSIPTTLVDEFILSPVVKRAFIQSIKVINAVINRFGLPEDIIIELAREKNSKDRRKFINKLQKQNEATRKKIEQLLAKYGNTNAKYMIEKIKLHDMQEGKCLYSLEAIPLEDLLSNPTHYEVDHIIPRSVSFDNSLNNKVLVKQSENSKKGNRTPYQYLSSNESKISYNQFKQHILNLSKAKDRISKKKRDMLLEERDINKFEVQKEFINRNLVDTRYATRELSNLLKTYFSTHDYAVKVKTINGGFTNHLRKVWDFKKHRNHGYKHHAEDALVIANADFLFKTHKALRRTDKILEQPGLEVNDTTVKVDTEEKYQELFETPKQVKNIKQFRDFKYSHRVDKKPNRQLINDTLYSTREIDGETYVVQTLKDLYAKDNEKVKKLFTERPQKILMYQHDPKTFEKLMTILNQYAEAKNPLAAYYEDKGEYVTKYAKKGNGPAIHKIKYIDKKLGSYLDVSNKYPETQNKLVKLSLKSFRFDIYKCEQGYKMVSIGYLDVLKKDNYYYIPKDKYEAEKQKKKIKESDLFVGSFYYNDLIMYEDELFRVIGVNSDINNLVELNMVDITYKDFCEVNNVTGEKRIKKTIGKRVVLIEKYTTDILGNLYKTPLPKKPQLIFKRGEL

SEQ ID NO: 8336 - protein, 1061 aa, synthetic construct
MQENQQKQNYILGLDIGITSVGYGLIDSKTREVIDAGVRLFPEADSENNSNRRSKRGARRLKRRRIHRLNRVKDLLADYQMIDLNNVPKSTDPYTIRVKGLREPLTKEEFAIALLHIAKRRGLHNISVSMGDEEQDNELSTKQQLQKNAQQLQDKYVCELQLERLTNINKVRGEKNRFKTEDFVKEVKQLCETQRQYHNIDDQFIQQYIDLVSTRREYFEGPGNGSPYGWDGDLLKWYEKLMGRCTYFPEELRSVKYAYSADLFNALNDLNNLVVTRDDNPKLEYYEKYHIIENVFKQKKNPTLKQIAKEIGVQDYDIRGYRITKSGKPQFTSFKLYHDLKNIFEQAKYLEDVEMLDEIAKILTIYQDEISIKKALDQLPELLTESEKSQIAQLTGYTGTHRLSLKCIHIVIDELWESPENQMEIFTRLNLKPKKVEMSEIDSIPTTLVDEFILSPVVKRAFIQSIKVINAVINRFGLPEDIIIELAREKNSKDRRKFINKLQKQNEATRKKIEQLLAKYGNTNAKYMIEKIKLHDMQEGKCLYSLEAIPLEDLLSNPTHYEVDHIIPRSVSFDNSLNNKVLVKQSENSKKGNRTPYQYLSSNESKISYNQFKQHILNLSKAKDRISKKKRDMLLEERDINKFEVQKEFINRNLVDTRYATRELSNLLKTYFSTHDYAVKVKTINGGFTNHLRKVWDFKKHRNHGYKHHAEDALVIANADFLFKTHKALRRTDKILEQPGLEVNDTTVKVDTEEKYQELFETPKQVKNIKQFRDFKYSHRVDKKPNRKLINDTLYSTREIDGETYVVQTLKDLYAKDNEKVKKLFTERPQKILMYQHDPKTFEKLMTILNQYAEAKNPLAAYYEDKGEYVTKYAKKGNGPAIHKIKYIDKKLGSYLDVSNKYPETQNKLVKLSLKSFRFDIYKCEQGYKMVSIGYLDVLKKDNYYYIPKDKYEAEKQKKKIKESDLFVGSFYKNDLIMYEDELFRVIGVNSDINNLVELNMVDITYKDFCEVNNVTGEKHIKKTIGKRVVLIEKYTTDILGNLYKTPLPKKPQLIFKRGEL

SEQ ID NO: 8337 - protein, 1375 aa, synthetic construct
MEKKYSIGLDIGTNSVGWAVITDDYKVPSKKFKVLGNTNRKSIKKNLMGALLFDSGETAEATRLKRTARRRYTRRKNRIRYLQEIFANEMAKLDDSFFQRLEESFLVEEDKKNERHPIFGNLADEVAYHRNYPTIYHLRKKLADSPEKADLRLIYLALAHIIKFRGHFLIEGKLNAENSDVAKLFYQLIQTYNQLFEESPLDEIEVDAKGILSARLSKSKRLEKLIAVFPNEKKNGLFGNIIALALGLTPNFKSNFDLTEDAKLQLSKDTYDDDLDELLGQIGDQYADLFSAAKNLSDAILLSDILRSNSEVTKAPLSASMVKRYDEHHQDLALLKTLVRQQFPEKYAEIFKDDTKNGYAGYVGADKKLRKRSGKLATEEEFYKFIKPILEKMDGAEELLAKLNRDDLLRKQRTFDNGSIPHQIHLKELHAILRRQEEFYPFLKENREKIEKILTFRIPYYVGPLARGNSRFAWLTRKSEEAITPWNFEEVVDKGASAQSFIERMTNFDEQLPNKKVLPKHSLLYEYFTVYNELTKVKYVTERMRKPEFLSGEQKKAIVDLLFKTNRKVTVKQLKEDYFKKIECFDSVEIIGVEDRFNASLGTYHDLLKIIKDKDFLDNEENEDILEDIVLTLTLFEDREMIEERLKTYAHLFDDKVMKQLKRRHYTGWGRLSRKMINGIRDKQSGKTILDFLKSDGFSNRNFMQLIHDDSLTFKEEIEKAQVSGQGDSLHEQIADLAGSPAIKKGILQTVKIVDELVKVMGHKPENIVIEMARENQTTTKGLQQSRERKKRIEEGIKELESQILKENPVENTQLQNEKLYLYYLQNGRDMYVDQELDINRLSDYDVDHIVPQSFIKDDSIDNKVLTRSVENRGKSDNVPSEEVVKKMKNYWRQLLNAKLITQRKFDNLTKAERGGLSEADKAGFIKRQLVETRQITKHVARILDSRMNTKRDKNDKPIREVKVITLKSKLVSDFRKDFQLYKVRDINNYHHAHDAYLNAVVGTALIKKYPKLESEFVYGDYKVYDVRKMIAKSEQEIGKATAKRFFYSNIMNFFKTEVKLANGEIRKRPLIETNGETGEVVWNKEKDFATVRKVLAMPQVNIVKKTEVQTGGFSKESILSKRESAKLIPRKKGWDTRKYGGFGSPTVAYSILVVAKVEKGKAKKLKSVKVLVGITIMEKGSYEKDPIGFLEAKGYKDIKKELIFKLPKYSLFELENGRRRMLASAKELQKANELVLPQHLVRLLYYTQNISATTGSNNLGYIEQHREEFKEIFEKIIDFSEKYILKNKVNSNLKSSFDEQFAVSDSILLSNSFVSLLKYTSFGASGGFTFLDLDVKQGRLRYQTVTEVLDATLIYQSITGLYETRTDLSQLGGD

SEQ ID NO: 8338 - protein, 1368 aa, synthetic construct [sequence omitted]

SEQ ID NO: 8339 - protein, 1368 aa, synthetic construct
MDKKYSIGLDIGTNSVGWAVITDEYKVPSKKFKVLGNTDRHSIKKNLIGALLFDSGETAEATRLKRTARRRYTRRKNRICYLQEIFSNEMAKVDDSFFHRLEESFLVEEDKKHERHPIFGNIVDEVAYHEKYPTIYHLRKKLVDSTDKADLRLIYLALAHMIKFRGHFLIEGDLNPDNSDVDKLFIQLVQTYNQLFEENPINASGVDAKAILSARLSKSRRLENLIAQLPGEKKNGLFGNLIALSLGLTPNFKSNFDLAEDAKLQLSKDTYDDDLDNLLAQIGDQYADLFLAAKNLSDAILLSDILRVNTEITKAPLSASMIKRYDEHHQDLTLLKALVRQQLPEKYKEIFFDQSKNGYAGYIDGGASQEEFYKFIKPILEKMDGTEELLVKLNREDLLRKQRTFDNGSIPHQIHLGELHAILRRQEDFYPFLKDNREKIEKILTFRIPYYVGPLARGNSRFAWMTRKSEETITPWNFEEVVDKGASAQSFIERMTNFDKNLPNEKVLPKHSLLYEYFTVYNELTKVKYVTEGMRKPAFLSGEQKKAIVDLLFKTNRKVTVKQLKEDYFKKIECFDSVEISGVEDRFNASLGTYHDLLKIIKDKDFLDNEENEDILEDIVLTLTLFEDREMIEERLKTYAHLFDDKVMKQLKRRRYTGWGRLSRKLINGIRDKQSGKTILDFLKSDGFANRNFMQLIHDDSLTFKEDIQKAQVSGQGDSLHEHIANLAGSPAIKKGILQTVKVVDELVKVMGRHKPENIVIEMARENQTTQKGQKNSRERMKRIEEGIKELGSQILKEHPVENTQLQNEKLYLYYLQNGRDMYVDQELDINRLSDYDVDHIVPQSFLKDDSIDNKVLTRSDKNRGKSDNVPSEEVVKKMKNYWRQLLNAKLITQRKFDNLTKAERGGLSELDKAGFIKRQLVETRQITKHVAQILDSRMNTKYDENDKLIREVKVITLKSKLVSDFRKDFQFYKVREINNYHHAHDAYLNAVVGTALIKKYPKLESEFVYGDYKVYDVRKMIAKSEQEIGKATAKYFFYSNIMNFFKTEITLANGEIRKRPLIETNGETGEIVWDKGRDFATVRKVLSMPQVNIVKKTEVQTGGFSKESIRPKRNSDKLIARKKDWDPKKYGGFVSPTVAYSVLVVAKVEKGKSKKLKSVKELLGITIMERSSFEKNPIDFLEAKGYKEVKKDLIIKLPKYSLFELENGRKRMLASARFLQKGNELALPSKYVNFLYLASHYEKLKGSPEDNEQKQLFVEQHKHYLDEIIEQISEFSKRVILADANLDKVLSAYNKHRDKPIREQAENIIHLFTLTNLGAPRAFKYFDTTIDRKVYRSTKEVLDATLIHQSITGLYETRIDLSQLGGD

SEQ ID NO: 8340 - protein, 1368 aa, synthetic construct
MDKKYSIGLDIGTNSVGWAVITDEYKVPSKKFKVLGNTDRHSIKKNLIGALLFDSGETAERTRLKRTARRRYTRRKNRICYLQEIFSNEMAKVDDSFFHRLEESFLVEEDKKHERHPIFGNIVDEVAYHEKYPTIYHLRKKLVDSTDKADLRLIYLALAHMIKFRGHFLIEGDLNPDNSDVDKLFIQLVQTYNQLFEENPINASGVDAKAILSARLSKSRRLENLIAQLPGEKKNGLFGNLIALSLGLTPNFKSNFDLAEDAKLQLSKDTYDDDLDNLLAQIGDQYADLFLAAKNLSDAILLSDILRVNTEITKAPLSASMIKRYDEHHQDLTLLKALVRQQLPEKYKEIFFDQSKNGYAGYIDGGASQEEFYKFIKPILEKMDGTEELLVKLNREDLLRKQRTFDNGSIPHQIHLGELHAILRRQEDFYPFLKDNREKIEKILTFRIPYYVGPLARGNSRFAWMTRKSEETITPWNFEEVVDKGASAQSFIERMTNFDKNLPNEKVLPKHSLLYEYFTVYNELTKVKYVTEGMRKPAFLSGEQKKAIVDLLFKTNRKVTVKQLKEDYFKKIECFDSVEISGVEDRFNASLGTYHDLLKIIKDKDFLDNEENEDILEDIVLTLTLFEDREMIEERLKTYAHLFDDKVMKQLKRRRYTGWGRLSRKLINGIRDKQSGKTILDFLKSDGFANRNFMQLIHDDSLTFKEDIQKAQVSGQGDSLHEHIANLAGSPAIKKGILQTVKVVDELVKVMGRHKPENIVIEMARENQTTQKGQKNSRERMKRIEEGIKELGSQILKEHPVENTQLQNEKLYLYYLQNGRDMYVDQELDINRLSDYDVDHIVPQSFLKDDSIDNKVLTRSDKNRGKSDNVPSEEVVKKMKNYWRQLLNAKLITQRKFDNLTKAERGGLSELDKAGFIKRQLVETRQITKHVAQILDSRMNTKYDENDKLIREVKVITLKSKLVSDFRKDFQFYKVREINNYHHAHDAYLNAVVGTALIKKYPKLESEFVYGDYKVYDVRKMIAKSEQEIGKATAKYFFYSNIMNFFKTEITLANGEIRKRPLIETNGETGEIVWDKGRDFATVRKVLSMPQVNIVKKTEVQTGGFSKESIRPKRNSDKLIARKKDWDPKKYGGFLWPTVAYSVLVVAKVEKGKSKKLKSVKELLGITIMERSSFEKNPIDFLEAKGYKEVKKDLIIKLPKYSLFELENGRKRMLASAKQLQKGNELALPSKYVNFLYLASHYEKLKGSPEDNEQKQLFVEQHKHYLDEIIEQISEFSKRVILADANLDKVLSAYNKHRDKPIREQAENIIHLFTLTRLGAPRAFKYFDTTIDPKQYRSTKEVLDATLIHQSITGLYETRIDLSQLGGD

SEQ ID NO: 8341 - protein, 1121 aa, synthetic construct
MSDLVLGLDIGIGSVGVGILNKVTGEIIHKNSRIFPAAQAENNLVRRTNRQGRRLARRKKHRRVRLNRLFEESGLITDFTKISINLNPYQLRVKGLTDELSNEELFIALKNMVKHRGISYLDDASDDGNSSVGDYAQIVKENSKQLETKTPGQIQLERYQTYGQLRGDFTVEKDGKKHRLINVFPTSAYRSEALRILQTQQEFNPQITDEFINRYLEILTGKRKYYHGPGNEKSRTDYGRYRTSGETLDNIFGILIGKCTFYPDEFRAAKASYTAQEFNLLNDLNNLTVPTETKKLSKEQKNQIINYVKNEKAMGPAKLFKYIAKLLSCDVADIKGYRIDKSGKAEIHTFEAYRKMKTLETLDIEQMDRETLDKLAYVLTLNTEREGIQEALEHEFADGSFSQKQVDELVQFRKANSSIFGKGWHNFSVKLMMELIPELYETSEEQMTILTRLGKQKTTSSSNKTKYIDEKLLTEEIYNPVVAKSVRQAIKIVNAAIKEYGDFDNIVIEMARETNEDDEKKAIQKIQKANKDEKDAAMLKAANQYNGKAELPHSVFHGHKQLATKIRLWHQQGERCLYTGKTISIHDLINNSNQFEVDHILPLSITFDDSLANKVLVYATANQEKGQRTPYQALDSMDDAWSFRELKAFVRESKTLSNKKKEYLLTEEDISKFDVRKKFIERNLVDTRYASRVVLNALQEHFRAHKIDTKVSVVRGQFTSQLRRHWGIEKTRDTYHHHAVDALIIAASSQLNLWKKQKNTLVSYSEDQLLDIETGELISDDEYKESVFKAPYQHFVDTLKSKEFEDSILFSYQVDSKFNRKISDATIYATRQAKVGKDKADETYVLGKIKDIYTQDGYDAFMKIYKKDKSKFLMYRHDPQTFEKVIEPILENYPNKQINEKGKEVPCNPFLKYKEEHGYIRKYSKKGNGPEIKSLKYYDSKLGNHIDITPKDSNNKVVLQSVSPWRADVYFNKTTGKYEILGLKYADLQFEKGTGTYKISQEKYNDIKKKEGVDSDSEFKFTLYKNDLLLVKDTETKEQQLFRFLSRTMPKQKHYVELKPYDKQKFEGGEALIKVLGNVANSGQCKKGLGKSNISIYKVRTDVLGNQHIIKNEGDKPKLDF

SEQ ID NO: 8342 - protein, 1092 aa, synthetic construct
MAYTMGIDVGIASCGWAIVDLERQRIIDIGVRTFEKAENPKNGEALAVPRREARSSRRRLRRKKHRIERLKHMFVRNGLAVDIQHLEQTLRSQNEIDVWQLRVDGLDRMLTQKEWLRVLIHLAQRRGFQSNRKTDGSSEDGQVLVNVTENDRLMEEKDYRTVAEMMVKDEKFSDHKRNKNGNYHGVVSRSSLLVEIHTLFETQRQHHNSLASKDFELEYVNIWSAQRPVATKDQIEKMIGTCTFLPKEKRAPKASWHFQYFMLLQTINHIRITNVQGTRSLNKEEIEQVVNMALTKSKVSYHDTRKILDLSEEYQFVGLDYGKEDEKKKVESKETIIKLDDYHKLNKIFNEVELAKGETWEADDYDTVAYALTFFKDDEDIRDYLQNKYKDSKNRLVKNLANKEYTNELIGKVSTLSFRKVGHLSLKALRKIIPFLEQGMTYDKACQAAGFDFQGISKKKRSVVLPVIDQISNPVVNRALTQTRKVINALIKKYGSPETIHIETARELSKTFDERKNITKDYKENRDKNEHAKKHLSELGIINPTGLDIVKYKLWCEQQGRCMYSNQPISFERLKESGYTEVDHIIPYSRSMNDSYNNRVLVMTRENREKGNQTPFEYMGNDTQRWYEFEQRVTTNPQIKKEKRQNLLLKGFTNRRELEMLERNLNDTRYITKYLSHFISTNLEFSPSDKKKKVVNTSGRITSHLRSRWGLEKNRGQNDLHHAMDAIVIAVTSDSFIQQVTNYYKRKERRELNGDDKFPLPWKFFREEVIARLSPNPKEQIEALPNHFYSEDELADLQPIFVSRMPKRSITGEAHQAQFRRVVGKTKEGKNITAKKTALVDISYDKNGDFNMYGRETDPATYEAIKERYLEFGGNVKKAFSTDLHKPKKDGTKGPLIKSVRIMENKTLVHPVNKGKGVVYNSSIVRTDVFQRKEKYYLLPVYVTDVTKGKLPNKVIVAKKGYHDWIEVDDSFTFLFSLYPNDLIFIRQNPKKKISLKKRIESHSISDSKEVQEIHAYYKGVDSSTAAIEFIIHDGSYYAKGVGVQNLDCFEKYQVDILGNYFKVKGEKRLELETSDSNHKGKDVNSIKSTSR

SEQ ID NO: 8343 - protein, 1053 aa, synthetic construct
MKRNYILGLDIGITSVGYGIIDYETRDVIDAGVRLFKEANVENNEGRRSKRGARRLKRRRRHRIQRVKKLLFDYNLLTDHSELSGINPYEARVKGLSQKLSEEEFSAALLHLAKRRGVHNVNEVEEDTGNELSTKEQISRNSKALEEKYVAELQLERLKKDGEVRGSINRFKTSDYVKEAKQLLKVQKAYHQLDQSFIDTYIDLLETRRTYYEGPGEGSPFGWKDIKEWYEMLMGHCTYFPEELRSVKYAYNADLYNALNDLNNLVITRDENEKLEYYEKFQIIENVFKQKKKPTLKQIAKEILVNEEDIKGYRVTSTGKPEFTNLKVYHDIKDITARKEIIENAELLDQIAKILTIYQSSEDIQEELTNLNSELTQEEIEQISNLKGYTGTHNLSLKAINLILDELWHTNDNQIAIFNRLKLVPKKVDLSQQKEIPTTLVDDFILSPVVKRSFIQSIKVINAIIKKYGLPNDIIIELAREKNSKDAQKMINEMQKRNRQTNERIEEIIRTTGKENAKYLIEKIKLHDMQEGKCLYSLEAIPLEDLLNNPFNYEVDHIIPRSVSFDNSFNNKVLVKQEENSKKGNRTPFQYLSSSDSKISYETFKKHILNLAKGKGRISKTKKEYLLEERDINRFSVQKDFINRNLVDTRYATRGLMNLLRSYFRVNNLDVKVKSINGGFTSFLRRKWKFKKERNKGYKHHAEDALIIANADFIFKEWKKLDKAKKVMENQMFEEKQAESMPEIETEQEYKEIFITPHQIKHIKDFKDYKYSHRVDKKPNRKLINDTLYSTRKDDKGNTLIVNNLNGLYDKDNDKLKKLINKSPEKLLMYHHDPQTYQKLKLIMEQYGDEKNPLYKYYEETGNYLTKYSKKDNGPVIKKIKYYGNKLNAHLDITDDYPNSRNKVVKLSLKPYRFDVYLDNGVYKFVTVKNLDVIKKENYYEVNSKCYEEAKKLKKISNQAEFIASFYKNDLIKINGELYRVIGVNSDKNNLIEVNMIDITYREYLENMNDKRPPHIIKTIASKTQSIKKYSTDILGNLYEVKSKKHPQIIKKG

SEQ ID NO: 8344 - protein, 1053 aa, synthetic construct
MKRNYILGLDIGITSVGYGIIDYETRDVIDAGVRLFKEANVENNEGRRSKRGARRLKRRRRHRIQRVKKLLFDYNLLTDHSELSGINPYEARVKGLSQKLSEEEFSAALLHLAKRRGVHNVNEVEEDTGNELSTKEQISRNSKALEEKYVAELQLERLKKDGEVRGSINRFKTSDYVKEAKQLLKVQKAYHQLDQSFIDTYIDLLETRRTYYEGPGEGSPFGWKDIKEWYEMLMGHCTYFPEELRSVKYAYNADLYNALNDLNNLVITRDENEKLEYYEKFQIIENVFKQKKKPTLKQIAKEILVNEEDIKGYRVTSTGKPEFTNLKVYHDIKDITARKEIIENAELLDQIAKILTIYQSSEDIQEELTNLNSELTQEEIEQISNLKGYTGTHNLSLKAINLILDELWHTNDNQIAIFNRLKLVPKKVDLSQQKEIPTTLVDDFILSPVVKRSFIQSIKVINAIIKKYGLPNDIIIELAREKNSKDAQKMINEMQKRNRQTNERIEEIIRTTGKENAKYLIEKIKLHDMQEGKCLYSLEAIPLEDLLNNPFNYEVDHIIPRSVSFDNSFNNKVLVKQEENSKKGNRTPFQYLSSSDSKISYETFKKHILNLAKGKGRISKTKKEYLLEERDINRFSVQKDFINRNLVDTRYATRGLMNLLRSYFRVNNLDVKVKSINGGFTSFLRRKWKFKKERNKGYKHHAEDALIIANADFIFKEWKKLDKAKKVMENQMFEEKQAESMPEIETEQEYKEIFITPHQIKHIKDFKDYKYSHRVDKKPNRKLINDTLYSTRKDDKGNTLIVNNLNGLYDKDNDKLKKLINKSPEKLLMYHHDPQTYQKLKLIMEQYGDEKNPLYKYYEETGNYLTKYSKKDNGPVIKKIKYYGNKLNAHLDITDDYPNSRNKVVKLSLKPYRFDVYLDNGVYKFVTVKNLDVIKKENYYEVNSKCYEEAKKLKKISNQAEFIASFYKNDLIKINGELYRVIGVNNSTRNIVELNMIDITYREYLENMNDKRPPHIIKTIASKTQSIKKYSTDILGNLYEVKSKKHPQIIKKG

SEQ ID NO: 8345 - protein, 1053 aa, synthetic construct
MKRNYILGLDIGITSVGYGIIDYETRDVIDAGVRLFKEANVENNEGRRSKRGARRLKRRRRHRIQRVKKLLFDYNLLTDHSELSGINPYEARVKGLSQKLSEEEFSAALLHLAKRRGVHNVNEVEEDTGNELSTKEQISRNSKALEEKYVAELQLERLKKDGEVRGSINRFKTSDYVKEAKQLLKVQKAYHQLDQSFIDTYIDLLETRRTYYEGPGEGSPFGWKDIKEWYEMLMGHCTYFPEELRSVKYAYNADLYNALNDLNNLVITRDENEKLEYYEKFQIIENVFKQKKKPTLKQIAKEILVNEEDIKGYRVTSTGKPEFTNLKVYHDIKDITARKEIIENAELLDQIAKILTIYQSSEDIQEELTNLNSELTQEEIEQISNLKGYTGTHNLSLKAINLILDELWHTNDNQIAIFNRLKLVPKKVDLSQQKEIPTTLVDDFILSPVVKRSFIQSIKVINAIIKKYGLPNDIIIELAREKNSKDAQKMINEMQKRNRQTNERIEEIIRTTGKENAKYLIEKIKLHDMQEGKCLYSLEAIPLEDLLNNPFNYEVDHIIPRSVSFDNSFNNKVLVKQEENSKKGNRTPFQYLSSSDSKISYETFKKHILNLAKGKGRISKTKKEYLLEERDINRFSVQKDFINRNLVDTRYATRGLMNLLRSYFRVNNLDVKVKSINGGFTSFLRRKWKFKKERNKGYKHHAEDALIIANADFIFKEWKKLDKAKKVMENQMFEEKQAESMPEIETEQEYKEIFITPHQIKHIKDFKDYKYSHRVDKKPNRKLINDTLYSTRKDDKGNTLIVNNLNGLYDKDNDKLKKLINKSPEKLLMYHHDPQTYQKLKLIMEQYGDEKNPLYKYYEETGNYLTKYSKKDNGPVIKKIKYYGNKLNAHLDITDDYPNSRNKVVKLSLKPYRFDVYLDNGVYKFVTVKNLDVIKKENYYEVNSKCYEEAKKLKKISNQAEFIASFYKNDLIKINGELYRVIGVNSDDRNIIELNMIDITYREYLENMNDKRPPHIIKTIASKTQSIKKYSTDILGNLYEVKSKKHPQIIKKG

SEQ ID NO: 8346 - protein, 1053 aa, synthetic construct
MKRNYILGLDIGITSVGYGIIDYETRDVIDAGVRLFKEANVENNEGRRSKRGARRLKRRRRHRIQRVKKLLFDYNLLTDHSELSGINPYEARVKGLSQKLSEEEFSAALLHLAKRRGVHNVNEVEEDTGNELSTKEQISRNSKALEEKYVAELQLERLKKDGEVRGSINRFKTSDYVKEAKQLLKVQKAYHQLDQSFIDTYIDLLETRRTYYEGPGEGSPFGWKDIKEWYEMLMGHCTYFPEELRSVKYAYNADLYNALNDLNNLVITRDENEKLEYYEKFQIIENVFKQKKKPTLKQIAKEILVNEEDIKGYRVTSTGKPEFTNLKVYHDIKDITARKEIIENAELLDQIAKILTIYQSSEDIQEELTNLNSELTQEEIEQISNLKGYTGTHNLSLKAINLILDELWHTNDNQIAIFNRLKLVPKKVDLSQQKEIPTTLVDDFILSPVVKRSFIQSIKVINAIIKKYGLPNDIIIELAREKNSKDAQKMINEMQKRNRQTNERIEEIIRTTGKENAKYLIEKIKLHDMQEGKCLYSLEAIPLEDLLNNPFNYEVDHIIPRSVSFDNSFNNKVLVKQEENSKKGNRTPFQYLSSSDSKISYETFKKHILNLAKGKGRISKTKKEYLLEERDINRFSVQKDFINRNLVDTRYATRGLMNLLRSYFRVNNLDVKVKSINGGFTSFLRRKWKFKKERNKGYKHHAEDALIIANADFIFKEWKKLDKAKKVMENQMFEEKQAESMPEIETEQEYKEIFITPHQIKHIKDFKDYKYSHRVDKKPNRKLINDTLYSTRKDDKGNTLIVNNLNGLYDKDNDKLKKLINKSPEKLLMYHHDPQTYQKLKLIMEQYGDEKNPLYKYYEETGNYLTKYSKKDNGPVIKKIKYYGNKLNAHLDITDDYPNSRNKVVKLSLKPYRFDVYLDNGVYKFVTVKNLDVIKKENYYEVNSKCYEEAKKLKKISNQAEFIASFYKNDLIKINGELYRVIGVNNNRLNKIELNMIDITYREYLENMNDKRPPHIIKTIASKTQSIKKYSTDILGNLYEVKSKKHPQIIKKG

SEQ ID NO: 8347 - protein, 1084 aa, synthetic construct
MKYHVGIDVGTFSVGLAAIEVDDAGMPIKTLSLVSHIHDSGLDPDEIKSAVTRLASSGIARRTRRLYRRKRRRLQQLDKFIQRQGWPVIELEDYSDPLYPWKVRAELAASYIADEKERGEKLSVALRHIARHRGWRNPYAKVSSLYLPDGPSDAFKAIREEIKRASGQPVPETATVGQMVTLCELGTLKLRGEGGVLSARLQQSDYAREIQEICRMQEIGQELYRKIIDVVFAAESPKGSASSRVGKDPLQPGKNRALKASDAFQRYRIAALIGNLRVRVDGEKRILSVEEKNLVFDHLVNLTPKKEPEWVTIAEILGIDRGQLIGTATMTDDGERAGARPPTHDTNRSIVNSRIAPLVDWWKTASALEQHAMVKALSNAEVDDFDSPEGAKVQAFFADLDDDVHAKLDSLHLPVGRAAYSEDTLVRLTRRMLSDGVDLYTARLQEFGIEPSWTPPTPRIGEPVGNPAVDRVLKTVSRWLESATKTWGAPERVIIEHVREGFVTEKRAREMDGDMRRRAARNAKLFQEMQEKLNVQGKPSRADLWRYQSVQRQNCQCAYCGSPITFSNSEMDHIVPRAGQGSTNTRENLVAVCHRCNQSKGNTPFAIWAKNTSIEGVSVKEAVERTRHWVTDTGMRSTDFKKFTKAVVERFQRATMDEEIDARSMESVAWMANELRSRVAQHFASHGTTVRVYRGSLTAEARRASGISGKLKFFDGVGKSRLDRRHHAIDAAVIAFTSDYVAETLAVRSNLKQSQAHRQEAPQWREFTGKDAEHRAAWRVWCQKMEKLSALLTEDLRDDRVVVMSNVRLRLGNGSAHKETIGKLSKVKLSSQLSVSDIDKASSEALWCALTREPGFDPKEGLPANPERHIRVNGTHVYAGDNIGLFPVSAGSIALRGGYAELGSSFHHARVYKITSGKKPAFAMLRVYTIDLLPYRNQDLFSVELKPQTMSMRQAEKKLRDALATGNAEYLGWLVVDDELVVDTSKIATDQVKAVEAELGTIRRWRVDGFFSPSKLRLRPLQMSKEGIKKESAPELSKIIDRPGWLPAVNKLFSDGNVTVVRRDSLGRVRLESTAHLPVTWKVQ

SEQ ID NO: 8348 - protein, 984 aa, synthetic construct
MARILAFDIGISSIGWAFSENDELKDCGVRIFTKVENPKTGESLALPRRLARSARKRLARRKARLNHLKHLIANEFKLNYEDYQSFDESLAKAYKGSLISPYELRFRALNELLSKQDFARVILHIAKRRGYDDIKNSDDKEKGAILKAIKQNEEKLANYQSVGEYLYKEYFQKFKENSKEFTNVRNKKESYERCIAQSFLKDELKLIFKKQREFGFSFSKKFEEEVLSVAFYKRALKDFSHLVGNCSFFTDEKRAPKNSPLAFMFVALTRIINLLNNLKNTEGILYTKDDLNALLNEVLKNGTLTYKQTKKLLGLSDDYEFKGEKGTYFIEFKKYKEFIKALGEHNLSQDDLNEIAKDITLIKDEIKLKKALAKYDLNQNQIDSLSKLEFKDHLNISFKALKLVTPLMLEGKKYDEACNELNLKVAINEDKKDFLPAFNETYYKDEVTNPVVLRAIKEYRKVLNALLKKYGKVHKINIELAREVGKNHSQRAKIEKEQNENYKAKKDAELECEKLGLKINSKNILKLRLFKEQKEFCAYSGEKIKISDLQDEKMLEIDHIYPYSRSFDDSYMNKVLVFTKQNQEKLNQTPFEAFGNDSAKWQKIEVLAKNLPTKKQKRILDKNYKDKEQKNFKDRNLNDTRYIARLVLNYTKDYLDFLPLSDDENTKLNDTQKGSKVHVEAKSGMLTSALRHTWGFSAKDRNNHLHHAIDAVIIAYANNSIVKAFSDFKKEQESNSAELYAKKISELDYKNKRKFFEPFSGFRQKVLDKIDEIFVSKPERKKPSGALHEETFRKEEEFYQSYGGKEGVLKALELGKIRKVNGKIVKNGDMFRVDIFKHKKTNKFYAVPIYTMDFALKVLPNKAVARSKKGEIKDWILMDENYEFCFSLYKDSLILIQTKDMQEPEFVYYNAFTSSTVSLIVSKHDNKFETLSKNQKILFKNANEKEVIAKSIGIQNLKVFEKYIVSALGEVTKAEFRQREDFKK

SEQ ID NO: 8349 - protein, 1087 aa, synthetic construct
MRYKIGLDIGITSVGWAVMNLDIPRIEDLGVRIFDRAENPQTGESLALPRRLARSARRRLRRRKHRLERIRRLVIREGILTKEELDKLFEEKHEIDVWQLRVEALDRKLNNDELARVLLHLAKRRGFKSNRKSERSNKENSTMLKHIEENRAILSSYRTVGEMIVKDPKFALHKRNKGENYTNTIARDDLEREIRLIFSKQREFGNMSCTEEFENEYITIWASQRPVASKDDIEKKVGFCTFEPKEKRAPKATYTFQSFIAWEHINKLRLISPSGARGLTDEERRLLYEQAFQKNKITYHDIRTLLHLPDDTYFKGIVYDRGESRKQNENIRFLELDAYHQIRKAVDKVYGKGKSSSFLPIDFDTFGYALTLFKDDADIHSYLRNEYEQNGKRMPNLANKVYDNELIEELLNLSFTKFGHLSLKALRSILPYMEQGEVYSSACERAGYTFTGPKKKQKTMLLPNIPPIANPVVMRALTQARKVVNAIIKKYGSPVSIHIELARDLSQTFDERRKTKKEQDENRKKNETAIRQLMEYGLTLNPTGHDIVKFKLWSEQNGRCAYSLQPIEIERLLEPGYVEVDHVIPYSRSLDDSYTNKVLVLTRENREKGNRIPAEYLGVGTERWQQFETFVLTNKQFSKKKRDRLLRLHYDENEETEFKNRNLNDTRYISRFFANFIREHLKFAESDDKQKVYTVNGRVTAHLRSRWEFNKNREESDLHHAVDAVIVACTTPSDIAKVTAFYQRREQNKELAKKTEPHFPQPWPHFADELRARLSKHPKESIKALNLGNYDDQKLESLQPVFVSRMPKRSVTGAAHQETLRRYVGIDERSGKIQTVVKTKLSEIKLDASGHFPMYGKESDPRTYEAIRQRLLEHNNDPKKAFQEPLYKPKKNGEPGPVIRTVKIIDTKNQVIPLNDGKTVAYNSNIVRVDVFEKDGKYYCVPVYTMDIMKGILPNKAIEPNKPYSEWKEMTEDYTFRFSLYPNDLIRIELPREKTVKTAAGEEINVKDVFVYYKTIDSANGGLELISHDHRFSLRGVGSRTLKRFEKYQVDVLGNIYKVRGEKRVGLASSAHSKPGKTIRPLQSTRD

SEQ ID NO: 8350 - protein, 1378 aa, synthetic construct
MDKKYSIGLDIGTNSVGWAVITDEYKVPSKKFKVLGNTDRHSIKKNLIGALLFDSGETAEATRLKRTARRRYTRRKNRICYLQEIFSNEMAKVDDSFFHRLEESFLVEEDKKHERHPIFGNIVDEVAYHEKYPTIYHLRKKLVDSTDKADLRLIYLALAHMIKFRGHFLIEGDLNPDNSDVDKLFIQLVQTYNQLFEENPINASGVDAKAILSARLSKSRKLENLIAQLPGEKKNGLFGNLIALSLGLTPNFKSNFDLAEDAKLQLSKDTYDDDLDNLLAQIGDQYADLFLAAKNLSDAILLSDILRVNTEITKAPLSASMIKRYDEHHQDLTLLKALVRQQLPEKYKEIFFDQSKNGYAGYIDGGASQEEFYKFIKPILEKMDGTEELLVKLKREDLLRKQRTFDNGSIPHQIHLGELHAILRRQEDFYPFLKDNREKIEKILTFRIPYYVGPLARGNSRFAWMTRKSEETITPWNFEEVVDKGASAQSFIERMTNFDKNLPNEKVLPKHSLLYEYFTVYNELTKVKYVTEGMRKPAFLSGEQKKAIVDLLFKTNRKVTVKQLKEDYFKKIECFDSVEISGVEDRFNASLGTYHDLLKIIKDKDFLDNEENEDILEDIVLTLTLFEDREMIEERLKTYAHLFDDKVMKQLKRRRYTGWGRLSRKLINGIRDKQSGKTILDFLKSDGFANRNFMQLIHDDSLTFKEDIQKAQVSGQGDSLHEHIANLAGSPAIKKGILQTVKVVDELVKVMGRHKPENIVIEMARENQTTQKGQKNSRERMKRIEEGIKELGSQILKEHPVENTQLQNEKLYLYYLQNGRDMYVDQELDINRLSDYDVDHIVPQSFLKDDSIDNKVLTRSDKNRGKSDNVPSEEVVKKMKNYWRQLLNAKLITQRKFDNLTKAERGGLSELDKAGFIKRQLVETRQITKHVAQILDSRMNTKYDENDKLIREVKVITLKSKLVSDFRKDFQFYKVREINNYHHAHDAYLNAVVGTALIKKYPKLESEFVYGDYKVYDVRKMIAKSEQEIGKATAKYFFYSNIMNFFKTEITLANGEIRKRPLIETNGETGEIVWDKGRDFATVRKVLSMPQVNIVKKTEIQTVGQNGGLFDDNPKSPLEVTPSKLVPLKKELNPKKYGGYQKPTTAYPVLLITDTKQLIPISVMNKKQFEQNPVKFLRDRGYQQVGKNDFIKLPKYTLVDIGDGIKRLWASSKEIHKGNQLVVSKKSQILLYHAHHLDSDLSNDYLQNHNQQFDVLFNEIISFSKKCKLGKEHIQKIENVYSNKKNSASIEELAESFIKLLGFTQLGATSPFNFLGVKLNQKQYKGKKDYILPCTEGTLIRQSITGLYETRVDLSKIGEDSGGSGGSKRTADGSEFES

SEQ ID NO: 8351 - protein, 1082 aa, synthetic construct
MAAFKPNSINYILGLDIGIASVGWAMVEIDEEENPIRLIDLGVRVFERAEVPKTGDSLAMARRLARSVRRLTRRRAHRLLRTRRLLKREGVLQAANFDENGLIKSLPNTPWQLRAAALDRKLTPLEWSAVLLHLIKHRGYLSQRKNEGETADKELGALLKGVAGNAHALQTGDFRTPAELALNKFEKESGHIRNQRSDYSHTFSRKDLQAELILLFEKQKEFGNPHVSGGLKEGIETLLMTQRPALSGDAVQKMLGHCTFEPAEPKAAKNTYTAERFIWLTKLNNLRILEQGSERPLTDTERATLMDEPYRKSKLTYAQARKLLGLEDTAFFKGLRYGKDNAEASTLMEMKAYHAISRALEKEGLKDKKSPLNLSPELQDEIGTAFSLFKTDEDITGRLKDRIQPEILEALLKHISFDKFVQISLKALRRIVPLMEQGKRYDEACAEIYGDHYGKKNTEEKIYLPPIPADEIRNPVVLRALSQARKVINGVVRRYGSPARIHIETAREVGKSFKDRKEIEKRQEENRKDREKAAAKFREYFPNFVGEPKSKDILKLRLYEQQHGKCLYSGKEINLGRLNEKGYVEIDHALPFSRTWDDSFNNKVLVLGSENQNKGNQTPYEYFNGKDNSREWQEFKARVETSRFPRSKKQRILLQKFDEDGFKERNLNDTRYVNRFLCQFVADRMRLTGKGKKRVFASNGQITNLLRGFWGLRKVRAENDRHHALDAVVVACSTVAMQQKITRFVRYKEMNAFDGKTIDKETGEVLHQKTHFPQPWEFFAQEVMIRVFGKPDGKPEFEEADTLEKLRTLLAEKLSSRPEAVHEYVTPLFVSRAPNRKMSGQGHMETVKSAKRLDEGVSVLRVPLTQLKLKDLEKMVNREREPKLYEALKARLEAHKDDPAKAFAEPFYKYDKAGNRTQQVKAVRVEQVQKTGVWVRNHNGIADNATMVRVDVFEKGDKYYLVPIYSWQVAKGILPDRAVVQGKDEEDWQLIDDSFNFKFSLHPNDLVEVITKKARMFGYFASCHRGTGNINIRIHDLDHKIGKNGILEGIGVKTALSFQKYQIDELGKEIRPCRLKKRPPVR

SEQ ID NO: 8352 - protein, 1375 aa, synthetic construct
MEKKYSIGLDIGTNSVGWAVITDDYKVPSKKFKVLGNTNRKSIKKNLMGALLFDSGETAEATRLKRTARRRYTRRKNRIRYLQEIFANEMAKLDDSFFQRLEESFLVEEDKKNERHPIFGNLADEVAYHRNYPTIYHLRKKLADSPEKADLRLIYLALAHIIKFRGHFLIEGKLNAENSDVAKLFYQLIQTYNQLFEESPLDEIEVDAKGILSARLSKSKRLEKLIAVFPNEKKNGLFGNIIALALGLTPNFKSNFDLTEDAKLQLSKDTYDDDLDELLGQIGDQYADLFSAAKNLSDAILLSDILRSNSEVTKAPLSASMVKRYDEHHQDLALLKTLVRQQFPEKYAEIFKDDTKNGYAGYVGIGIKHRKRTTKLATQEEFYKFIKPILEKMDGAEELLAKLNRDDLLRKQRTFDNGSIPHQIHLKELHAILRRQEEFYPFLKENREKIEKILTFRIPYYVGPLARGNSRFAWLTRKSEEAITPWNFEEVVDKGASAQSFIERMTNFDEQLPNKKVLPKHSLLYEYFTVYNELTKVKYVTERMRKPEFLSGEQKKAIVDLLFKTNRKVTVKQLKEDYFKKIECFDSVEIIGVEDRFNASLGTYHDLLKIIKDKDFLDNEENEDILEDIVLTLTLFEDREMIEERLKTYAHLFDDKVMKQLKRRHYTGWGRLSRKMINGIRDKQSGKTILDFLKSDGFSNRNFMQLIHDDSLTFKEEIEKAQVSGQGDSLHEQIADLAGSPAIKKGILQTVKIVDELVKVMGHKPENIVIEMARENQTTTKGLQQSRERKKRIEEGIKELESQILKENPVENTQLQNEKLYLYYLQNGRDMYVDQELDINRLSDYDVDHIVPQSFIKDDSIDNKVLTRSVENRGKSDNVPSEEVVKKMKNYWRQLLNAKLITQRKFDNLTKAERGGLSEADKAGFIKRQLVETRQITKHVARILDSRMNTKRDKNDKPIREVKVITLKSKLVSDFRKDFQLYKVRDINNYHHAHDAYLNAVVGTALIKKYPKLESEFVYGDYKVYDVRKMIAKSEQEIGKATAKRFFYSNIMNFFKTEVKLANGEIRKRPLIETNGETGEVVWNKEKDFATVRKVLAMPQVNIVKKTEVQTGGFSKESILSKRESAKLIPRKKGWDTRKYGGFGSPTVAYSILVVAKVEKGKAKKLKSVKVLVGITIMEKGSYEKDPIGFLEAKGYKDIKKELIFKLPKYSLFELENGRRRMLASATELQKANELVLPQHLVRLLYYTQNISATTGSNNLGYIEQHREEFKEIFEKIIDFSEKYILKNKVNSNLKSSFDEQFAVSDSILLSNSFVSLLKYTSFGASGGFTFLDLDVKQGRLRYQTVTEVLDATLIYQSITGLYETRTDLSQLGGD

SEQ ID NO: 8353 - protein, 1375 aa, synthetic construct
MEKKYSIGLDIGTNSVGWAVITDDYKVPSKKFKVLGNTNRKSIKKNLMGALLFDSGETAEATRLKRTARRRYTRRKNRIRYLQEIFANEMAKLDDSFFQRLEESFLVEEDKKNERHPIFGNLADEVAYHRNYPTIYHLRKKLADSPEKADLRLIYLALAHIIKFRGHFLIEGKLNAENSDVAKLFYQLIQTYNQLFEESPLDEIEVDAKGILSARLSKSKRLEKLIAVFPNEKKNGLFGNIIALALGLTPNFKSNFDLTEDAKLQLSKDTYDDDLDELLGQIGDQYADLFSAAKNLSDAILLSDILRSNSEVTKAPLSASMVKRYDEHHQDLALLKTLVRQQFPEKYAEIFKDDTKNGYAGYVGADKKLRKRSGKLATEEEFYKFIKPILEKMDGAEELLAKLNRDDLLRKQRTFDNGSIPHQIHLKELHAILRRQEEFYPFLKENREKIEKILTFRIPYYVGPLARGNSRFAWLTRKSEEAITPWNFEEVVDKGASAQSFIERMTNFDEQLPNKKVLPKHSLLYEYFTVYNELTKVKYVTERMRKPEFLSGEQKKAIVDLLFKTNRKVTVKQLKEDYFKKIECFDSVEIIGVEDRFNASLGTYHDLLKIIKDKDFLDNEENEDILEDIVLTLTLFEDREMIEERLKTYAHLFDDKVMKQLKRRHYTGWGRLSRKMINGIRDKQSGKTILDFLKSDGFSNANFMQLIHDDSLTFKEEIEKAQVSGQGDSLHEQIADLAGSPAIKKGILQTVKIVDELVKVMGHKPENIVIEMARENQTTTKGLQQSRERKKRIEEGIKELESQILKENPVENTQLQNEKLYLYYLQNGRDMYVDQELDINRLSDYDVDHIVPQSFIKDDSIDNKVLTRSVENRGKSDNVPSEEVVKKMKNYWRQLLNAKLITQRKFDNLTKAERGGLSEADKAGFIKRQLVETRQITKHVARILDSRMNTKRDKNDKPIREVKVITLKSKLVSDFRKDFQLYKVRDINNYHHAHDAYLNAVVGTALIKKYPKLESEFVYGDYKVYDVRKMIAKSEQEIGKATAKRFFYSNIMNFFKTEVKLANGEIRKRPLIETNGETGEVVWNKEKDFATVRKVLAMPQVNIVKKTEVQTGGFSKESILSKRESAKLIPRKKGWDTRKYGGFGSPTVAYSILVVAKVEKGKAKKLKSVKVLVGITIMEKGSYEKDPIGFLEAKGYKDIKKELIFKLPKYSLFELENGRRRMLASAKELQKANELVLPQHLVRLLYYTQNISATTGSNNLGYIEQHREEFKEIFEKIIDFSEKYILKNKVNSNLKSSFDEQFAVSDSILLSNSFVSLLKYTSFGASGGFTFLDLDVKQGRLRYQTVTEVLDATLIYQSITGLYETRTDLSQLGGD

SEQ ID NO: 8354 - protein, 1368 aa, synthetic construct
MDKKYSIGLDIGTNSVGWAVITDEYKVPSKKFKVLGNTDRHSIKKNLIGALLFDSGETAEATRLKRTARRRYTRRKNRICYLQEIFSNEMAKVDDSFFHRLEESFLVEEDKKHERHPIFGNIVDEVAYHEKYPTIYHLRKKLVDSTDKADLRLIYLALAHMIKFRGHFLIEGDLNPDNSDVDKLFIQLVQTYNQLFEENPINASGVDAKAILSARLSKSRRLENLIAQLPGEKKNGLFGNLIALSLGLTPNFKSNFDLAEDAKLQLSKDTYDDDLDNLLAQIGDQYADLFLAAKNLSDAILLSDILRVNTEITKAPLSASMVKRYDEHHQDLTLLKALVRQQLPEKYKEIFFDQSKNGYAGYIDGGASQEEFYKFIKPILEKMDGTEELLVKLNREDLLRKQRTFDNGIIPHQIHLGELHAILRRQGDFYPFLKDNREKIEKILTFRIPYYVGPLARGNSRFAWMTRKSEETITPWNFEEVVDKGASAQSFIERMTNFDKNLPNEKVLPKHSLLYEYFTVYNELTKVKYVTEGMRKPAFLSGEQKKAIVDLLFKTNRKVTVKQLKEDYFKKIECFDSVEISGVEDRFNASLGTYHDLLKIIKDKDFLDNEENEDILEDIVLTLTLFEDREMIEERLKTYAHLFDDKVMKQLKRLRYTGWGRLSRKLINGIRDKQSGKTILDFLKSDGFANRNFMQLIHDDSLTFKEDIQKAQVSGQGDSLHEHIANLAGSPAIKKGILQTVKVVDELVKVMGGHKPENIVIEMARENQTTQKGQKNSRERMKRIEEGIKELGSQILKEHPVENTQLQNEKLYLYYLQNGRDMYVDQELDINRLSDYDVDHIVPQSFLKDDSIDNKVLTRSDKNRGKSDNVPSEEVVKKMKNYWRQLLNAKLITQRKFDNLTKAERGGLSELDKAGFIKRQLVETRQITKHVAQILDSRMNTKYDENDKLIREVKVITLKSKLVSDFRKDFQFYKVREINNYHHAHDAYLNAVVGTALIKKYPKLESEFVYGDYKVYDVRKMIAKSEQEIGKATAKYFFYSNIMNFFKTEITLANGEIRKRPLIETNGETGEIVWDKGRDFATVRKVLSMPQVNIVKKTEVQTGGFSKESILPKGNSDKLIARKKDWDPKKYGGFNSPTAAYSVLVVAKVEKGKSKKLKSVKELLGITIMERSSFEKNPIGFLEAKGYKEVKKDLIIKLPKYSLFELENGRKRMLASAGVLHKGNELALPSKYVNFLYLASHYEKLKGSPEDNEQKQLFVEQHKHYLDEIIEQISEFSKRVILADANLDKVLSAYNKHRDKPIREQAENIIHLFTLTNLGVPAAFKYFDTTIDKKRYTSTKEVLDATLIHQSITGLYETRIDLSQLGGD

SEQ ID NO: 8355 - protein, 1368 aa, synthetic construct
MDKKYSIGLDIGTNSVGWAVITDEYKVPSKKFKVLGNTDRHSIKKNLIGALLFDSGETAEATRLKRTARRRYTRRKNRICYLQEIFSNEMAKVDDSFFHRLEESFLVEEDKKHERHPIFGNIVDEVAYHEKYPTIYHLRKKLVDSTDKADLRLIYLALAHMIKFRGHFLIEGDLNPDNSDVDKLFIQLVQTYNQLFEENPINASGVDAKAILSARLSKSRRLENLIAQLPGEKKNGLFGNLIALSLGLTPNFKSNFDLAEDAKLQLSKDTYDDDLDNLLAQIGDQYADLFLAAKNLSDAILLSDILRVNTEITKAPLSASMVKRYDEHHQDLTLLKALVRQQLPEKYKEIFFDQSKNGYAGYIDGGASQEEFYKFIKPILEKMDGTEELLVKLNREDLLRKQRTFDNGIIPHQIHLGELHAILRRQGDFYPFLKDNREKIEKILTFRIPYYVGPLARGNSRFAWMTRKSEETITPWNFEEVVDKGASAQSFIERMTNFDKNLPNEKVLPKHSLLYEYFTVYNELTKVKYVTEGMRKPAFLSGEQKKAIVDLLFKTNRKVTVKQLKEDYFKKIECFDSVEISGVEDRFNASLGTYHDLLKIIKDKDFLDNEENEDILEDIVLTLTLFEDREMIEERLKTYAHLFDDKVMKQLKRLRYTGWGRLSRKLINGIRDKQSGKTILDFLKSDGFANRNFMQLIHDDSLTFKEDIQKAQVSGQGDSLHEHIANLAGSPAIKKGILQTVKVVDELVKVMGGHKPENIVIEMARENQTTQKGQKNSRERMKRIEEGIKELGSQILKEHPVENTQLQNEKLYLYYLQNGRDMYVDQELDINRLSDYDVDHIVPQSFLKDDSIDNKVLTRSDKNRGKSDNVPSEEVVKKMKNYWRQLLNAKLITQRKFDNLTKAERGGLSELDKAGFIKRQLVETRQITKHVAQILDSRMNTKYDENDKLIREVKVITLKSKLVSDFRKDFQFYKVREINNYHHAHDAYLNAVVGTALIKKYPKLESEFVYGDYKVYDVRKMIAKSEQEIGKATAKYFFYSNIMNFFKTEITLANGEIRKRPLIETNGETGEIVWDKGRDFATVRKVLSMPQVNIVKKTEVQTGGFSKESILPKGNSDKLIARKKDWDPKKYGGFNSPTVAYSVLVVAKVEKGKSKKLKSVKELLGITIMERSSFEKNPIGFLEAKGYKEVKKDLIIKLPKYSLFELENGRKRMLASASVLHKGNELALPSKYVNFLYLASHYEKLKGSSEDNKQKQLFVEQHKHYLDEIIEQISEFSKRVILADANLDKVLSAYNKHRDKPIREQAENIIHLFTLTNLGASAAFKYFDTTIGRKLYTSTKEVLDATLIHQSITGLYETRIDLSQLGGD

SEQ ID NO: 8356 - protein, 1368 aa, synthetic construct
MDKKYSIGLDIGTNSVGWAVITDEYKVPSKKFKVLGNTDRHSIKKNLIGALLFDSGETAEATRLKRTARRRYTRRKNRICYLQEIFSNEMAKVDDSFFHRLEESFLVEEDKKHERHPIFGNIVDEVAYHEKYPTIYHLRKKLVDSTDKADLRLIYLALAHMIKFRGHFLIEGDLNPDNSDVDKLFIQLVQTYNQLFEENPINASGVDAKAILSARLSKSRRLENLIAQLPGEKKNGLFGNLIALSLGLTPNFKSNFDLAEDAKLQLSKDTYDDDLDNLLAQIGDQYADLFLAAKNLSDAILLSDILRVNTEITKAPLSASMVKRYDEHHQDLTLLKALVRQQLPEKYKEIFFDQSKNGYAGYIDGGASQEEFYKFIKPILEKMDGTEELLVKLNREDLLRKQRTFDNGIIPHQIHLGELHAILRRQGDFYPFLKDNREKIEKILTFRIPYYVGPLARGNSRFAWMTRKSEETITPWNFEEVVDKGASAQSFIERMTNFDKNLPNEKVLPKHSLLYEYFTVYNELTKVKYVTEGMRKPAFLSGEQKKAIVDLLFKTNRKVTVKQLKEDYFKKIECFDSVEISGVEDRFNASLGTYHDLLKIIKDKDFLDNEENEDILEDIVLTLTLFEDREMIEERLKTYAHLFDDKVMKQLKRLRYTGWGRLSRKLINGIRDKQSGKTILDFLKSDGFANRNFMQLIHDDSLTFKEDIQKAQVSGQGDSLHEHIANLAGSPAIKKGILQTVKVVDELVKVMGGHKPENIVIEMARENQTTQKGQKNSRERMKRIEEGIKELGSQILKEHPVENTQLQNEKLYLYYLQNGRDMYVDQELDINRLSDYDVDHIVPQSFLKDDSIDNKVLTRSDKNRGKSDNVPSEEVVKKMKNYWRQLLNAKLITQRKFDNLTKAERGGLSELDKAGFIKRQLVETRQITKHVAQILDSRMNTKYDENDKLIREVKVITLKSKLVSDFRKDFQFYKVREINNYHHAHDAYLNAVVGTALIKKYPKLESEFVYGDYKVYDVRKMIAKSEQEIGKATAKYFFYSNIMNFFKTEITLANGEIRKRPLIETNGETGEIVWDKGRDFATVRKVLSMPQVNIVKKTEVQTGGFSKESILPKGNSDKLIARKKDWDPKKYGGFNSPTVAYSVLVVAKVEKGKSKKLKSVKELLGITIMERSSFEKNPIDFLEAKGYKEVKKDLIIKLPKYSLFELENGRKRMLASAGVLQKGNELALPSKYVNFLYLASHYEKLKGSPEDNEQKQLFVEQHKHYLDEIIEQISEFSKRVILADANLDKVLSAYNKHRDKPIREQAENIIHLFTLTNLGAPAAFKYFDTTINRKQYNTTKEVLDATLIRQSITGLYETRIDLSQLGGD

SEQ ID NO: 8357 - protein, 1368 aa, synthetic construct [sequence omitted]

SEQ ID NO: 8358 - protein, 1368 aa, synthetic construct
MDKKYSIGLDIGTNSVGWAVITDEYKVPSKKFKVLGNTDRHSIKKNLIGALLFDSGETAEATRLKRTARRRYTRRKNRICYLQEIFSNEMAKVDDSFFHRLEESFLVEEDKKHERHPIFGNIVDEVAYHEKYPTIYHLRKKLVDSTDKADLRLIYLALAHMIKFRGHFLIEGDLNPDNSDVDKLFIQLVQTYNQLFEENPINASGVDAKAILSARLSKSRRLENLIAQLPGEKKNGLFGNLIALSLGLTPNFKSNFDLAEDAKLQLSKDTYDDDLDNLLAQIGDQYADLFLAAKNLSDAILLSDILRVNTEITKAPLSASMIKRYDEHHQDLTLLKALVRQQLPEKYKEIFFDQSKNGYAGYIDGGASQEEFYKFIKPILEKMDGTEELLVKLNREDLLRKQRTFDNGSIPHQIHLGELHAILRRQEDFYPFLKDNREKIEKILTFRIPYYVGPLARGNSRFAWMTRKSEETITPWNFEEVVDKGASAQSFIERMTNFDKNLPNEKVLPKHSLLYEYFTVYNELTKVKYVTEGMRKPAFLSGEQKKAIVDLLFKTNRKVTVKQLKEDYFKKIECFDSVEISGVEDRFNASLGTYHDLLKIIKDKDFLDNEENEDILEDIVLTLTLFEDREMIEERLKTYAHLFDDKVMKQLKRRRYTGWGRLSRKLINGIRDKQSGKTILDFLKSDGFANRNFMQLIHDDSLTFKEDIQKAQVSGQGDSLHEHIANLAGSPAIKKGILQTVKVVDELVKVMGRHKPENIVIEMARENQTTQKGQKNSRERMKRIEEGIKELGSQILKEHPVENTQLQNEKLYLYYLQNGRDMYVDQELDINRLSDYDVDHIVPQSFLKDDSIDNKVLTRSDKNRGKSDNVPSEEVVKKMKNYWRQLLNAKLITQRKFDNLTKAERGGLSELDKAGFIKRQLVETRQITKHVAQILDSRMNTKYDENDKLIREVKVITLKSKLVSDFRKDFQFYKVREINNYHHAHDAYLNAVVGTALIKKYPKLESEFVYGDYKVYDVRKMIAKSEQEIGKATAKYFFYSNIMNFFKTEITLANGEIRKRPLIETNGETGEIVWDKGRDFATVRKVLSMPQVNIVKKTEVQTGGFSKESILPKRNSDKLIARKKDWDPKKYGGFDSPTVAYSVLVVAKVEKGKSKKLKSVKELLGITIMERSSFEKNPIDFLEAKGYKEVKKDLIIKLPKYSLFELENGRKRMLASARELQKGNELALPSKYVNFLYLASHYEKLKGSPEDNEQKQLFVEQHKHYLDEIIEQISEFSKRVILADAQLDKVLSAYNKHRDKPIREQAENIIHLFTLTNLGAPAAFKYFDTTFKQKQYRSTKEVLDATLIHQSITGLYETRIDLSQLGGD

SEQ ID NO: 8359 - protein, 1368 aa, synthetic construct
MDKKYSIGLDIGTNSVGWAVITDEYKVPSKKFKVLGNTDRHSIKKNLIGALLFDSGETAEATRLKRTARRRYTRRKNRICYLQEIFSNEMAKVDDSFFHRLEESFLVEEDKKHERHPIFGNIVDEVAYHEKYPTIYHLRKKLVDSTDKADLRLIYLALAHMIKFRGHFLIEGDLNPDNSDVDKLFIQLVQTYNQLFEENPINASGVDAKAILSARLSKSRRLENLIAQLPGEKKNGLFGNLIALSLGLTPNFKSNFDLAEDAKLQLSKDTYDDDLDNLLAQIGDQYADLFLAAKNLSDAILLSDILRVNTEITKAPLSASMIKRYDEHHQDLTLLKALVRQQLPEKYKEIFFDQSKNGYAGYIDGGASQEEFYKFIKPILEKMDGTEELLVKLNREDLLRKQRTFDNGSIPHQIHLGELHAILRRQEDFYPFLKDNREKIEKILTFRIPYYVGPLARGNSRFAWMTRKSEETITPWNFEEVVDKGASAQSFIERMTNFDKNLPNEKVLPKHSLLYEYFTVYNELTKVKYVTEGMRKPAFLSGEQKKAIVDLLFKTNRKVTVKQLKEDYFKKIECFDSVEISGVEDRFNASLGTYHDLLKIIKDKDFLDNEENEDILEDIVLTLTLFEDREMIEERLKTYAHLFDDKVMKQLKRRRYTGWGRLSRKLINGIRDKQSGKTILDFLKSDGFANRNFMQLIHDDSLTFKEDIQKAQVSGQGDSLHEHIANLAGSPAIKKGILQTVKVVDELVKVMGRHKPENIVIEMARENQTTQKGQKNSRERMKRIEEGIKELGSQILKEHPVENTQLQNEKLYLYYLQNGRDMYVDQELDINRLSDYDVDHIVPQSFLKDDSIDNKVLTRSDKNRGKSDNVPSEEVVKKMKNYWRQLLNAKLITQRKFDNLTKAERGGLSELDKAGFIKRQLVETRQITKHVAQILDSRMNTKYDENDKLIREVKVITLKSKLVSDFRKDFQFYKVREINNYHHAHDAYLNAVVGTALIKKYPKLESEFVYGDYKVYDVRKMIAKSEQEIGKATAKYFFYSNIMNFFKTEITLANGEIRKRPLIETNGETGEIVWDKGRDFATVRKVLSMPQVNIVKKTEVQTGGFSKESILPKRNSDKLIARKKDWDPKKYGGFLWPTVAYSVLVVAKVEKGKSKKLKSVKELLGITIMERSSFEKNPIDFLEAKGYKEVKKDLIIKLPKYSLFELENGRKRMLASAKQLQKGNELALPSKYVNFLYLASHYEKLKGSPEDNEQKQLFVEQHKHYLDEIIEQISEFSKRVILADANLDKVLSAYNKHRDKPIREQAENIIHLFTLTNLGAPAAFKYFDTTIDRKQYRSTKEVLDATLIHQSITGLYETRIDLSQLGGD

SEQ ID NO: 8360 - protein, 1368 aa, synthetic construct
MDKKYSIGLDIGTNSVGWAVITDEYKVPSKKFKVLGNTDRHSIKKNLIGALLFDSGETAEATRLKRTARRRYTRRKNRICYLQEIFSNEMAKVDDSFFHRLEESFLVEEDKKHERHPIFGNIVDEVAYHEKYPTIYHLRKKLVDSTDKADLRLIYLALAHMIKFRGHFLIEGDLNPDNSDVDKLFIQLVQTYNQLFEENPINASGVDAKAILSARLSKSRRLENLIAQLPGEKKNGLFGNLIALSLGLTPNFKSNFDLAEDAKLQLSKDTYDDDLDNLLAQIGDQYADLFLAAKNLSDAILLSDILRVNTEITKAPLSASMIKRYDEHHQDLTLLKALVRQQLPEKYKEIFFDQSKNGYAGYIDGGASQEEFYKFIKPILEKMDGTEELLVKLNREDLLRKQRTFDNGSIPHQIHLGELHAILRRQEDFYPFLKDNREKIEKILTFRIPYYVGPLARGNSRFAWMTRKSEETITPWNFEEVVDKGASAQSFIERMTNFDKNLPNEKVLPKHSLLYEYFTVYNELTKVKYVTEGMRKPAFLSGEQKKAIVDLLFKTNRKVTVKQLKEDYFKKIECFDSVEISGVEDRFNASLGTYHDLLKIIKDKDFLDNEENEDILEDIVLTLTLFEDREMIEERLKTYAHLFDDKVMKQLKRRRYTGWGRLSRKLINGIRDKQSGKTILDFLKSDGFANRNFMQLIHDDSLTFKEDIQKAQVSGQGDSLHEHIANLAGSPAIKKGILQTVKVVDELVKVMGRHKPENIVIEMARENQTTQKGQKNSRERMKRIEEGIKELGSQILKEHPVENTQLQNEKLYLYYLQNGRDMYVDQELDINRLSDYDVDHIVPQSFLKDDSIDNKVLTRSDKNRGKSDNVPSEEVVKKMKNYWRQLLNAKLITQRKFDNLTKAERGGLSELDKAGFIKRQLVETRQITKHVAQILDSRMNTKYDENDKLIREVKVITLKSKLVSDFRKDFQFYKVREINNYHHAHDAYLNAVVGTALIKKYPKLESEFVYGDYKVYDVRKMIAKSEQEIGKATAKYFFYSNIMNFFKTEITLANGEIRKRPLIETNGETGEIVWDKGRDFATVRKVLSMPQVNIVKKTEVQTGGFSKESILPKRNSDKLIARKKDWDPKKYGGFVSPTVAYSVLVVAKVEKGKSKKLKSVKELLGITIMERSSFEKNPIDFLEAKGYKEVKKDLIIKLPKYSLFELENGRKRMLASAGELQKGNELALPSKYVNFLYLASHYEKLKGSPEDNEQKQLFVEQHKHYLDEIIEQISEFSKRVILADANLDKVLSAYNKHRDKPIREQAENIIHLFTLTNLGAPAAFKYFDTTIDRKQYRSTKEVLDATLIHQSITGLYETRIDLSQLGGD

SEQ ID NO: 8361 - protein, 1368 aa, synthetic construct
MDKKYSIGLDIGTNSVGWAVITDEYKVPSKKFKVLGNTDRHSIKKNLIGALLFDSGETAEATRLKRTARRRYTRRKNRICYLQEIFSNEMAKVDDSFFHRLEESFLVEEDKKHERHPIFGNIVDEVAYHEKYPTIYHLRKKLVDSTDKADLRLIYLALAHMIKFRGHFLIEGDLNPDNSDVDKLFIQLVQTYNQLFEENPINASGVDAKAILSARLSKSRRLENLIAQLPGEKKNGLFGNLIALSLGLTPNFKSNFDLAEDAKLQLSKDTYDDDLDNLLAQIGDQYADLFLAAKNLSDAILLSDILRVNTEITKAPLSASMIKRYDEHHQDLTLLKALVRQQLPEKYKEIFFDQSKNGYAGYIDGGASQEEFYKFIKPILEKMDGTEELLVKLNREDLLRKQRTFDNGSIPHQIHLGELHAILRRQEDFYPFLKDNREKIEKILTFRIPYYVGPLARGNSRFAWMTRKSEETITPWNFEEVVDKGASAQSFIERMTNFDKNLPNEKVLPKHSLLYEYFTVYNELTKVKYVTEGMRKPAFLSGEQKKAIVDLLFKTNRKVTVKQLKEDYFKKIECFDSVEISGVEDRFNASLGTYHDLLKIIKDKDFLDNEENEDILEDIVLTLTLFEDREMIEERLKTYAHLFDDKVMKQLKRRRYTGWGRLSRKLINGIRDKQSGKTILDFLKSDGFANRNFMQLIHDDSLTFKEDIQKAQVSGQGDSLHEHIANLAGSPAIKKGILQTVKVVDELVKVMGRHKPENIVIEMARENQTTQKGQKNSRERMKRIEEGIKELGSQILKEHPVENTQLQNEKLYLYYLQNGRDMYVDQELDINRLSDYDVDHIVPQSFLKDDSIDNKVLTRSDKNRGKSDNVPSEEVVKKMKNYWRQLLNAKLITQRKFDNLTKAERGGLSELDKAGFIKRQLVETRQITKHVAQILDSRMNTKYDENDKLIREVKVITLKSKLVSDFRKDFQFYKVREINNYHHAHDAYLNAVVGTALIKKYPKLESEFVYGDYKVYDVRKMIAKSEQEIGKATAKYFFYSNIMNFFKTEITLANGEIRKRPLIETNGETGEIVWDKGRDFATVRKVLSMPQVNIVKKTEVQTGGFSKESILPKRNSDKLIARKKDWDPKKYGGFVSPTVAYSVLVVAKVEKGKSKKLKSVKELLGITIMERSSFEKNPIDFLEAKGYKEVKKDLIIKLPKYSLFELENGRKRMLASARELQKGNELALPSKYVNFLYLASHYEKLKGSPEDNEQKQLFVEQHKHYLDEIIEQISEFSKRVILADANLDKVLSAYNKHRDKPIREQAENIIHLFTLTNLGAPAAFKYFDTTIDRKEYRSTKEVLDATLIHQSITGLYETRIDLSQLGGD

SEQ ID NO: 8362 - protein, 1368 aa, synthetic construct
MDKKYSIGLDIGTNSVGWAVITDEYKVPSKKFKVLGNTDRHSIKKNLIGALLFDSGETAEATRLKRTARRRYTRRKNRICYLQEIFSNEMAKVDDSFFHRLEESFLVEEDKKHERHPIFGNIVDEVAYHEKYPTIYHLRKKLVDSTDKADLRLIYLALAHMIKFRGHFLIEGDLNPDNSDVDKLFIQLVQTYNQLFEENPINASGVDAKAILSARLSKSRRLENLIAQLPGEKKNGLFGNLIALSLGLTPNFKSNFDLAEDTKLQLSKDTYDDDLDNLLAQIGDQYADLFLAAKNLSDAILLSDILRVNTEITKAPLSASMIKLYDEHHQDLTLLKALVRQQLPEKYKEIFFDQSKNGYAGYIDGGASQEEFYKFIKPILEKMDGTEELLVKLNREDLLRKQRTFDNGIIPHQIHLGELHAILRRQEDFYPFLKDNREKIEKILTFRIPYYVGPLARGNSRFAWMTRKSEETITPWNFEKVVDKGASAQSFIERMTNFDKNLPNEKVLPKHSLLYEYFTVYNELTKVKYVTEGMRKPAFLSGDQKKAIVDLLFKTNRKVTVKQLKEDYFKKIECFDSVEISGVEDRFNASLGTYHDLLKIIKDKDFLDNEENEDILEDIVLTLTLFEDREMIEERLKTYAHLFDDKVMKQLKRRRYTGWGRLSRKLINGIRDKQSGKTILDFLKSDGFANRNFIQLIHDDSLTFKEDIQKAQVSGQGDSLHEHIANLAGSPAIKKGILQTVKVVDELVKVMGRHKPENIVIEMARENQTTQKGQKNSRERMKRIEEGIKELGSQILKEHPVENTQLQNEKLYLYYLQNGRDMYVDQELDINRLSDYDVDHIVPQSFLKDDSIDNKVLTRSDKNRGKSDNVPSEEVVKKMKNYWRQLLNAKLITQRKFDNLTKAERGGLSELDKAGFIKRQLVETRQITKHVAQILDSRMNTKYDENDKLIREVKVITLKSKLVSDFRKDFQFYKVREINNYHHAHDAYLNAVVGTALIKKYPKLESEFVYGDYKVYDVRKMIAKSEQEIGKATAKYFFYSNIMNFFKTEITLANGEIRKRPLIETNGETGEIVWDKGRDFATVRKVLSMPQVNIVKKTEVQTGGFSKESILPKRNSDKLIARKKDWDPKKYGGFDSPTVAYSVLVVAKVEKGKSKKLKSVKELLGITIMERSSFEKNPIDFLEAKGYKEVKKDLIIKLPKYSLFELENGRKRMLASAGVLQKGNELALPSKYVNFLYLASHYEKLKGSPEDNEQKQLFVEQHKHYLDEIIEQISEFSKRVILADANLDKVLSAYNKHRDKPIREQAENIIHLFTLTNLGAPAAFKYFDTTIDRKRYTSTKEVLDATLIHQSITGLYETRIDLSQLGGD

SEQ ID NO: 8363 - protein, 1368 aa, synthetic construct
MDKKYSIGLDIGTNSVGWAVITDEYKVPSKKFKVLGNTDRHSIKKNLIGALLFDSGETAEATRLKRTARRRYTRRKNRICYLQEIFSNEMAKVDDSFFHRLEESFLVEEDKKHERHPIFGNIVDEVAYHEKYPTIYHLRKKLVDSTDKADLRLIYLALAHMIKFRGHFLIEGDLNPDNSDVDKLFIQLVQTYNQLFEENPINASGVDAKAILSARLSKSRRLENLIAQLPGEKKNGLFGNLIALSLGLTPNFKSNFDLAEDTKLQLSKDTYDDDLDNLLAQIGDQYADLFLAAKNLSDAILLSDILRVNTEITKAPLSASMIKLYDEHHQDLTLLKALVRQQLPEKYKEIFFDQSKNGYAGYIDGGASQEEFYKFIKPILEKMDGTEELLVKLNREDLLRKQRTFDNGIIPHQIHLGELHAILRRQEDFYPFLKDNREKIEKILTFRIPYYVGPLARGNSRFAWMTRKSEETITPWNFEKVVDKGASAQSFIERMTNFDKNLPNEKVLPKHSLLYEYFTVYNELTKVKYVTEGMRKPAFLSGDQKKAIVDLLFKTNRKVTVKQLKEDYFKKIECFDSVEISGVEDRFNASLGTYHDLLKIIKDKDFLDNEENEDILEDIVLTLTLFEDREMIEERLKTYAHLFDDKVMKQLKRRRYTGWGRLSRKLINGIRDKQSGKTILDFLKSDGFANRNFIQLIHDDSLTFKEDIQKAQVSGQGDSLHEHIANLAGSPAIKKGILQTVKVVDELVKVMGRHKPENIVIEMARENQTTQKGQKNSRERMKRIEEGIKELGSQILKEHPVENTQLQNEKLYLYYLQNGRDMYVDQELDINRLSDYDVDHIVPQSFLKDDSIDNKVLTRSDKNRGKSDNVPSEEVVKKMKNYWRQLLNAKLITQRKFDNLTKAERGGLSELDKAGFIKRQLVETRQITKHVAQILDSRMNTKYDENDKLIREVKVITLKSKLVSDFRKDFQFYKVREINNYHHAHDAYLNAVVGTALIKKYPKLESEFVYGDYKVYDVRKMIAKSEQEIGKATAKYFFYSNIMNFFKTEITLANGEIRKRPLIETNGETGEIVWDKGRDFATVRKVLSMPQVNIVKKTEVQTGGFSKESIRPKRNSDKLIARKKDWDPKKYGGFVSPTVAYSVLVVAKVEKGKSKKLKSVKELLGITIMERSSFEKNPIDFLEAKGYKEVKKDLIIKLPKYSLFELENGRKRMLASARFLQKGNELALPSKYVNFLYLASHYEKLKGSPEDNEQKQLFVEQHKHYLDEIIEQISEFSKRVILADANLDKVLSAYNKHRDKPIREQAENIIHLFTLTNLGAPRAFKYFDTTIDRKVYRSTKEVLDATLIHQSITGLYETRIDLSQLGGD

SEQ ID NO: 8364 - protein, 1122 aa, synthetic construct
MSDLVLGLDIGIGSVGVGILNKVTGEIIHKNSRIFPAAQAENNLVRRTNRQGRRLARRKKHRRVRLNRLFEESGLITDFTKISINLNPYQLRVKGLTDELSNEELFIALKNMVKHRGISYLDDASDDGNSSVGDYAQIVKENSKQLETKTPGQIQLERYQTYGQLRGDFTVEKDGKKHRLINVFPTSAYRSEALRILQTQQEFNPQITDEFINRYLEILTGKRKYYHGPGNEKSRTDYGRYRTSGETLDNIFGILIGKCTFYPDEFRAAKASYTAQEFNLLNDLNNLTVPTETKKLSKEQKNQIINYVKNEKAMGPAKLFKYIAKLLSCDVADIKGYRIDKSGKAEIHTFEAYRKMKTLETLDIEQMDRETLDKLAYVLTLNTEREGIQEALEHEFADGSFSQKQVDELVQFRKANSSIFGKGWHNFSVKLMMELIPELYETSEEQMTILTRLGKQKTTSSSNKTKYIDEKLLTEEIYNPVVAKSVRQAIKIVNAAIKEYGDFDNIVIEMARETNEDDEKKAIQKIQKANKDEKDAAMLKAANQYNGKAELPHSVFHGHKQLATKIRLWHQQGERCLYTGKTISIHDLINNSNQFEVDHILPLSITFDDSLANKVLVYATANQEKGQRTPYQALDSMDDAWSFRELKAFVRESKTLSNKKKEYLLTEEDISKFDVRKKFIERNLVDTRYASRVVLNALQEHFRAHKIDTKVSVVRGQFTSQLRRHWGIEKTRDTYHHHAVDALIIAASSQLNLWKKQKNTLVSYSEEQLLDIETGELISDDEYKESVFKAPYQHFVDTLKSKEFEDSILFSYQVDSKFNRKISDATIYATRQAKVGKDKKDETYVLGKIKDIYTQDGYDAFMKIYKKDKSKFLMYRHDPQTFEKVIEPILENYPNKQMNEKGKEVPCNPFLKYKEEHGYIRKYSKKGNGPEIKSLKYYDSKLLGNPIDITPENSKNKVVLQSLKPWRTDVYFNKATGKYEILGLKYADLQFEKGTGTYKISQEKYNDIKKKEGVDSDSEFKFTLYKNDLLLVKDTETKEQQLFRFLSRTLPKQKHYVELKPYDKQKFEGGEALIKVLGNVANGGQCIKGLAKSNISIYKVRTDVLGNQHIIKNEGDKPKLDF

SEQ ID NO: 8365 - protein, 1122 aa, synthetic construct
MSDLVLGLDIGIGSVGVGILNKVTGEIIHKNSRIFPAAQAENNLVRRTNRQGRRLARRKKHRRVRLNRLFEESGLITDFTKISINLNPYQLRVKGLTDELSNEELFIALKNMVKHRGISYLDDASDDGNSSVGDYAQIVKENSKQLETKTPGQIQLERYQTYGQLRGDFTVEKDGKKHRLINVFPTSAYRSEALRILQTQQEFNPQITDEFINRYLEILTGKRKYYHGPGNEKSRTDYGRYRTSGETLDNIFGILIGKCTFYPDEFRAAKASYTAQEFNLLNDLNNLTVPTETKKLSKEQKNQIINYVKNEKAMGPAKLFKYIAKLLSCDVADIKGYRIDKSGKAEIHTFEAYRKMKTLETLDIEQMDRETLDKLAYVLTLNTEREGIQEALEHEFADGSFSQKQVDELVQFRKANSSIFGKGWHNFSVKLMMELIPELYETSEEQMTILTRLGKQKTTSSSNKTKYIDEKLLTEEIYNPVVAKSVRQAIKIVNAAIKEYGDFDNIVIEMARETNEDDEKKAIQKIQKANKDEKDAAMLKAANQYNGKAELPHSVFHGHKQLATKIRLWHQQGERCLYTGKTISIHDLINNSNQFEVDHILPLSITFDDSLANKVLVYATANQEKGQRTPYQALDSMDDAWSFRELKAFVRESKTLSNKKKEYLLTEEDISKFDVRKKFIERNLVDTRYASRVVLNALQEHFRAHKIDTKVSVVRGQFTSQLRRHWGIEKTRDTYHHHAVDALIIAASSQLNLWKKQKNTLVSYSEEQLLDIETGELISDDEYKESVFKAPYQHFVDTLKSKEFEDSILFSYQVDSKFNRKISDATIYATRQAKVGKDKKDETYVLGKIKDIYTQDGYDAFMKIYKKDKSKFLMYRHDPQTFEKVIEPILENYPNKQMNEKGKEVPCNPFLKYKEEHGYIRKYSKKGNGPEIKSLKYYDSKLLGNPIDITPENSKNKVVLQSLKPWRTDVYFNKNTGKYEILGLKYADLQFEKKTGTYKISQEKYNGIMKEEGVDSDSEFKFTLYKNDLLLVKDTETKEQQLFRFLSRTMPNVKYYVELKPYSKDKFEKNESLIEILGSADKSGRCIKGLGKSNISIYKVRTDVLGNQHIIKNEGDKPKLDF

SEQ ID NO: 8366 - protein, 1120 aa, synthetic construct
MSDLVLGLDIGIGSVGVGILNKVTGEIIHKNSRIFPAAQAENNLVRRTNRQGRRLARRKKHRRVRLNRLFEESGLITDFTKISINLNPYQLRVKGLTDELSNEELFIALKNMVKHRGISYLDDASDDGNSSVGDYAQIVKENSKQLETKTPGQIQLERYQTYGQLRGDFTVEKDGKKHRLINVFPTSAYRSEALRILQTQQEFNPQITDEFINRYLEILTGKRKYYHGPGNEKSRTDYGRYRTSGETLDNIFGILIGKCTFYPDEFRAAKASYTAQEFNLLNDLNNLTVPTETKKLSKEQKNQIINYVKNEKAMGPAKLFKYIAKLLSCDVADIKGYRIDKSGKAEIHTFEAYRKMKTLETLDIEQMDRETLDKLAYVLTLNTEREGIQEALEHEFADGSFSQKQVDELVQFRKANSSIFGKGWHNFSVKLMMELIPELYETSEEQMTILTRLGKQKTTSSSNKTKYIDEKLLTEEIYNPVVAKSVRQAIKIVNAAIKEYGDFDNIVIEMARETNEDDEKKAIQKIQKANKDEKDAAMLKAANQYNGKAELPHSVFHGHKQLATKIRLWHQQGERCLYTGKTISIHDLINNSNQFEVDHILPLSITFDDSLANKVLVYATANQEKGQRTPYQALDSMDDAWSFRELKAFVRESKTLSNKKKEYLLTEEDISKFDVRKKFIERNLVDTRYASRVVLNALQEHFRAHKIDTKVSVVRGQFTSQLRRHWGIEKTRDTYHHHAVDALIIAASSQLNLWKKQKNTLVSYSEDQLLDIETGELISDDEYKESVFKAPYQHFVDTLKSKEFEDSILFSYQVDSKFNRKISDATIYATRQAKVGKDKADETYVLGKIKDIYTQDGYDAFMKIYKKDKSKFLMYRHDPQTFEKVIEPILENYPNKQINEKGKEVPCNPFLKYKEEHGYIRKYSKKGNGPEIKSLKYYDSKLGNHIDITPKDSNNKVVLQSLKPWRTDVYFNKNTGKYEILGLKYSDMQFEKGTGKYSISKEQYENIKVREGVDENSEFKFTLYKNDLLLLKDSENGEQILLRFTSRNDTSKHYVELKPYNRQKFEGSEYLIKSLGTVAKGGQCIKGLGKSNISIYKVRTDVLGNQHIIKNEGDKPKLDF

SEQ ID NO: 8367 - protein, 1120 aa, synthetic construct
MSDLVLGLDIGIGSVGVGILNKVTGEIIHKNSRIFPAAQAENNLVRRTNRQGRRLARRKKHRRVRLNRLFEESGLITDFTKISINLNPYQLRVKGLTDELSNEELFIALKNMVKHRGISYLDDASDDGNSSVGDYAQIVKENSKQLETKTPGQIQLERYQTYGQLRGDFTVEKDGKKHRLINVFPTSAYRSEALRILQTQQEFNPQITDEFINRYLEILTGKRKYYHGPGNEKSRTDYGRYRTSGETLDNIFGILIGKCTFYPDEFRAAKASYTAQEFNLLNDLNNLTVPTETKKLSKEQKNQIINYVKNEKAMGPAKLFKYIAKLLSCDVADIKGYRIDKSGKAEIHTFEAYRKMKTLETLDIEQMDRETLDKLAYVLTLNTEREGIQEALEHEFADGSFSQKQVDELVQFRKANSSIFGKGWHNFSVKLMMELIPELYETSEEQMTILTRLGKQKTTSSSNKTKYIDEKLLTEEIYNPVVAKSVRQAIKIVNAAIKEYGDFDNIVIEMARETNEDDEKKAIQKIQKANKDEKDAAMLKAANQYNGKAELPHSVFHGHKQLATKIRLWHQQGERCLYTGKTISIHDLINNSNQFEVDHILPLSITFDDSLANKVLVYATANQEKGQRTPYQALDSMDDAWSFRELKAFVRESKTLSNKKKEYLLTEEDISKFDVRKKFIERNLVDTRYASRVVLNALQEHFRAHKIDTKVSVVRGQFTSQLRRHWGIEKTRDTYHHHAVDALIIAASSQLNLWKKQKNTLVSYSEDQLLDIETGELISDDEYKESVFKAPYQHFVDTLKSKEFEDSILFSYQVDSKFNRKISDATIYATRQAKVGKDKADETYVLGKIKDIYTQDGYDAFMKIYKKDKSKFLMYRHDPQTFEKVIEPILENYPNKQINEKGKEVPCNPFLKYKEEHGYIRKYSKKGNGPEIKSLKYYDSKLGNHIDITPKDSNNKVVLQSLKPWRTDVYFNKNTGKYEILGLKYSDMQFEKGTGKYSISKEQYENIKVREGVDENSEFKFTLYKNDLLLLKDSENGEQILLRFTSRNDTSKHYVELKPYNRQKFEGSEYLIKSLGTVVKGGRCIKGLGKSNISIYKVRTDVLGNQHIIKNEGDKPKLDF

SEQ ID NO: 8368 - protein, 1057 aa, synthetic construct
MNQKFILGLDIGITSVGYGLIDYETKNIIDAGVRLFPEANVENNEGRRSKRGSRRLKRRRIHRLERVKLLLTEYDLINKEQIPTSNNPYQIRVKGLSEILSKDELAIALLHLAKRRGIHNVDVAADKEETASDSLSTKDQINKNAKFLESRYVCELQKERLENEGHVRGVENRFLTKDIVREAKKIIDTQMQYYPEIDETFKEKYISLVETRREYFEGPGQGSPFGWNGDLKKWYEMLMGHCTYFPQELRSVKYAYSADLFNALNDLNNLIIQRDNSEKLEYHEKYHIIENVFKQKKKPTLKQIAKEIGVNPEDIKGYRITKSGTPEFTSFKLFHDLKKVVKDHAILDDIDLLNQIAEILTIYQDKDSIVAELGQLEYLMSEADKQSISELTGYTGTHSLSLKCMNMIIDELWHSSMNQMEVFTYLNMRPKKYELKGYQRIPTDMIDDAILSPVVKRTFIQSINVINKVIEKYGIPEDIIIELARENNSDDRKKFINNLQKKNEATRKRINEIIGQTGNQNAKRIVEKIRLHDQQEGKCLYSLESIPLEDLLNNPNHYEVDHIIPRSVSFDNSYHNKVLVKQSENSKKSNLTPYQYFNSGKSKLSYNQFKQHILNLSKSQDRISKKKKEYLLEERDINKFEVQKEFINRNLVDTRYATRELTNYLKAYFSANNMNVKVKTINGSFTDYLRKVWKFKKERNHGYKHHAEDALIIANADFLFKENKKLKAVNSVLEKPEIETKQLDIQVDSEDNYSEMFIIPKQVQDIKDFRNFKYSHRVDKKPNRQLINDTLYSTRKKDNSTYIVQTIKDIYAKDNTTLKKQFDKSPEKFLMYQHDPRTFEKLEVIMKQYANEKNPLAKYHEETGEYLTKYSKKNNGPIVKSLKYIGNKLGSHLDVTHQFKSSTKKLVKLSIKNYRFDVYLTEKGYKFVTIAYLNVFKKDNYYYIPKDKYQELKEKKKIKDTDQFIASFYKNDLIKLNGDLYKIIGVNSDDRNIIELDYYDIKYKDYCEINNIKGEPRIKKTIGKKTESIEKFTTDVLGNLYLHSTEKAPQLIFKRGL

SEQ ID NO: 8369 - protein, 1057 aa, synthetic construct
MNQKFILGLDIGITSVGYGLIDYETKNIIDAGVRLFPEANVENNEGRRSKRGSRRLKRRRIHRLERVKLLLTEYDLINKEQIPTSNNPYQIRVKGLSEILSKDELAIALLHLAKRRGIHNVDVAADKEETASDSLSTKDQINKNAKFLESRYVCELQKERLENEGHVRGVENRFLTKDIVREAKKIIDTQMQYYPEIDETFKEKYISLVETRREYFEGPGQGSPFGWNGDLKKWYEMLMGHCTYFPQELRSVKYAYSADLFNALNDLNNLIIQRDNSEKLEYHEKYHIIENVFKQKKKPTLKQIAKEIGVNPEDIKGYRITKSGTPEFTSFKLFHDLKKVVKDHAILDDIDLLNQIAEILTIYQDKDSIVAELGQLEYLMSEADKQSISELTGYTGTHSLSLKCMNMIIDELWHSSMNQMEVFTYLNMRPKKYELKGYQRIPTDMIDDAILSPVVKRTFIQSINVINKVIEKYGIPEDIIIELARENNSDDRKKFINNLQKKNEATRKRINEIIGQTGNQNAKRIVEKIRLHDQQEGKCLYSLESIPLEDLLNNPNHYEVDHIIPRSVSFDNSYHNKVLVKQSENSKKSNLTPYQYFNSGKSKLSYNQFKQHILNLSKSQDRISKKKKEYLLEERDINKFEVQKEFINRNLVDTRYATRELTSYLKAYFSANNMDVKVKTINGSFTNHLRKVWRFDKYRNHGYKHHAEDALIIANADFLFKENKKLQNTNKILEKPTIENNTKKVTVEKEEDYNNVFETPKLVEDIKQYRDYKFSHRVDKKPNRQLINDTLYSTRMKDEHDYIVQTITDIYGKDNTNLKKQFNKNPEKFLMYQNDPKTFEKLSIIMKQYSDEKNPLAKYYEETGEYLTKYSKKNNGPIVKKIKLLGNKVGNHLDVTNKYENSTKKLVKLSIKNYRFDVYLTEKGYKFVTIAYLNVFKKDNYYYIPKDKYQELKEKKKIKDTDQFIASFYKNDLIKLNGDLYKIIGVNSDDRNIIELDYYDIKYKDYCEINNIKGEPRIKKTIGKKTESIEKFTTDVLGNLYLHSTEKAPQLIFKRGL

SEQ ID NO: 8370 - protein, 677 aa, synthetic construct
TLNIEDEYRLHETSKEPDVSLGSTWLSDFPQAWAETGGMGLAVRQAPLIIPLKATSTPVSIKQYPMSQEARLGIKPHIQRLLDQGILVPCQSPWNTPLLPVKKPGTNDYRPVQDLREVNKRVEDIHPTVPNPYNLLSGLPPSHQWYTVLDLKDAFFCLRLHPTSQPLFAFEWRDPEMGISGQLTWTRLPQGFKNSPTLFNEALHRDLADFRIQHPDLILLQYVDDLLLAATSELDCQQGTRALLQTLGNLGYRASAKKAQICQKQVKYLGYLLKEGQRWLTEARKETVMGQPTPKTPRQLREFLGKAGFCRLFIPGFAEMAAPLYPLTKPGTLFNWGPDQQKAYQEIKQALLTAPALGLPDLTKPFELFVDEKQGYAKGVLTQKLGPWRRPVAYLSKKLDPVAAGWPPCLRMVAAIAVLTKDAGKLTMGQPLVILAPHAVEALVKQPPDRWLSNARMTHYQALLLDTDRVQFGPVVALNPATLLPLPEEGLQHNCLDILAEAHGTRPDLTDQPLPDADHTWYTDGSSLLQEGQRKAGAAVTTETEVIWAKALPAGTSAQRAELIALTQALKMAEGKKLNVYTDSRYAFATAHIHGEIYRRRGWLTSEGKEIKNKDEILALLKALFLPKRLSIIHCPGHQKGHSAEARGNRMADQAARKAAITETPDTSTLLIENSSP

SEQ ID NO: 8371 - protein, 1020 aa, synthetic construct
MDEYQRSLSRPLLTIMSINIEGLSLAKEELLAKMSEDISCDILCIQETHRDITMRRPKILGMQLAVERPHRQYGSAIFVRSGVAISATSLTEVNNIEILSVELDSCTVSSLYKPPGADFYFTPPTSCHNHEAHFVVGDFNSHSCVWGYDEDDRNGEAVLTWADNSRMSLLHDSKLPPSFNSGRWKRGYNPDLIFVKESISHQCTKRVLNPIPNTQHRPICCVAYAAVRPKSVPFRRRYNFNKANWTKFTETLEAAISDIEPSIENYDLFVEAVKRSSRLSIPRGCRTSYLPGLNEESLNQLQEYLRLFQENPYSDGTIAAGQKLSTALANAKKDRWIELLENLDMSKSSRKAWQLLRRLDSDPLVNPGHANVTPDQIAHQLIQNGKTNCSRIKMKINRVPELETHQLSSPLNLKELREAIKRCKTGKAPGLDDLMMEQIKHLGAKAENWLLKFYNQCLAHKQIPRAWRKTKIIAILKPGKDASNARNYRPISLLCHLYKVYERMLLNRLGPVIEPKLIAQQAGFRPGKNCTGQILHLTEHIEEGYEKGCITGTVFVDLTAAYDTVQHRKMLHKVYHITRDFDFTKTVQTLLENRSFYVEFQGQKSRWRRQKNGLPQGSVLAPTLFNIFTNDQPQPPLTKSFIYADDLGLTTQAKDFETVEKQLTNALKDLSSYYKENHLKPNPAKTQVCAFHLRNREANRKLKVTWEGQELEHCFHPKYLGVTLDRTLTYRKHCMNTKHKVAARNNILRKLTGSAWGADPQVIRTSALALSFSTAEYACPVWHKSAHAKQVDIALNETCRIITGCLKPTPVDKLYKLAGIAPPDVRREVAANGERKKVEHCESHPLHGYHPPPTRLKSRKGFMRTTTPLDVPPAAARVSLWAAKPGNSNWMAPQEGLPPGANQEWATWKSLNRLRSGVGRSKDNLARWHYLEESSTLCDCGAEQTTQHMYACPQCPASCTEEELFKATDNAVAVARFWSKTIGGGSPKKKRKVSGSETPGTSESATPESVSGWRLFKKIS

SEQ ID NO: 8372 - RNA, 1351 nt, synthetic construct
  source 1..1351: mol_type = other RNA
agggggacacggaaagagcctccccgaagattgagtgaattcagtcgggcgtcccctgggcaacgtttcttgtaagcggccgatctttccaccccaaaagcattggatgagtttacggatccgaattctcgacggatcgatccgaacaaacgacccaacacccgtgcgttttattctgtctttttattgccgatcccccggccgctttacttgtacagctcgtccatgccgagagtgatcccggcggcggtcacgaactccagcaggaccatgtgatcgcgcttctcgttggggtctttgctcagggcggactgggtgctcaggtagtggttgtcgggcagcagcacggggccgtcgccgatgggggtgttctgctggtagtggtcggcgagctgcacgctgccgtcctcgatgttgtggcggatcttgaagttcaccttgatgccgttcttctgcttgtcggccatgatatagacgttgtggctgttgtagttgtactccagcttgtgccccaggatgttgccgtcctccttgaagtcgatgcccttcagctcgatgcggttcaccagggtgtcgccctcgaacttcacctcggcgcgggtcttgtagttgccgtcgtccttgaagaagatggtgcgctcctggacgtagccttcgggcatggcggacttgaagaagtcgtgctgcttcatgtggtcggggtagcggctgaagcactgcacgccgtaggtcagggtggtcacgagggtgggccagggcacgggcagcttgccggtggtgcagatgaacttcagggtcagcttgccgtaggtggcatcgccctcgccctcgccggacacgctgaacttgtggccgtttacgtcgccgtccagctcgaccaggatgggcaccaccccggtgaacagctcctcgcccttgctcaccatggtggctttaccaacagtaccggaatgccaagcttgggtcctgtgttctggcggcaaacccgttgcgaaaaagaacgttcacggcgactactgcacttatatacggttctcccccaccctcgggaaaaaggcggagccagtacacgacatcactttcccagtttaccccgcgccaccttctctaggcaccggatcaattgccgacccctccccccaacttctcggggactgtgggcgatgtgcgctctgccctagttgcttgtgatttcttttcttttttattttatttccattatttgaaatgtatttgttgtagcaatgcttttgacacgaaataaataaaagaaaaaaaaaaaaaaaaaaaaaaaaaaaaaaaaaaaaaaaaaaaaaaaaaaaaaaaaaaaaaaaaaaaaaaaaaaaaaaaa

SEQ ID NO: 8373 - RNA, 50 nt, synthetic construct; identical to SEQ ID NO: 8245
  source 1..50: mol_type = other RNA

SEQ ID NO: 8374 - RNA, 70 nt, synthetic construct; identical to SEQ ID NO: 8247
  source 1..70: mol_type = other RNA

SEQ ID NO: 8375 - RNA, 70 nt, synthetic construct
  source 1..70: mol_type = other RNA
aggatcatcaaacacataataatcaaataacaacactactcacaaacacttacaaatcaaacacgccacc

SEQ ID NO: 8376 - RNA, 101 nt, synthetic construct; identical to SEQ ID NO: 8250
  source 1..101: mol_type = other RNA

SEQ ID NO: 8377 - RNA, 74 nt, synthetic construct; identical to SEQ ID NO: 8246
  source 1..74: mol_type = other RNA

SEQ ID NO: 8378 - RNA, 14 nt, synthetic construct
  source 1..14: mol_type = other RNA
ttgcgttcgcgcaa
